United States Patent Application Publication US 2022/0211063 A1 - sequence listing, part 56

SEQ ID NO: 156 - DNA, 1380155 bp, Penicillium roqueforti
  misc_feature (15000)..(15662): n is a, c, g, or t
  misc_feature (17771)..(18557): n is a, c, g, or t
  misc_feature (101023)..(101241): n is a, c, g, or t
  misc_feature (169631)..(170396): n is a, c, g, or t
  misc_feature (215500)..(215913): n is a, c, g, or t
  misc_feature (219210)..(219525): n is a, c, g, or t
  misc_feature (223203)..(225039): n is a, c, g, or t
  misc_feature (231063)..(231291): n is a, c, g, or t
  misc_feature (337641)..(337773): n is a, c, g, or t
  misc_feature (338244)..(338772): n is a, c, g, or t
  misc_feature (339742)..(339933): n is a, c, g, or t
  misc_feature (370234)..(370243): n is a, c, g, or t
  misc_feature (453257)..(453275): n is a, c, g, or t
  misc_feature (463024)..(463044): n is a, c, g, or t
  misc_feature (468106)..(471999): n is a, c, g, or t
  misc_feature (492071)..(492841): n is a, c, g, or t
  misc_feature (498894)..(503490): n is a, c, g, or t
  misc_feature (507197)..(510434): n is a, c, g, or t
  misc_feature (527773)..(529964): n is a, c, g, or t
  misc_feature (549736)..(549944): n is a, c, g, or t
  misc_feature (582303)..(583195): n is a, c, g, or t
  misc_feature (772639)..(773169): n is a, c, g, or t
  misc_feature (797272)..(797478): n is a, c, g, or t
  misc_feature (799341)..(800440): n is a, c, g, or t
  misc_feature (833207)..(833354): n is a, c, g, or t
  misc_feature (925613)..(925783): n is a, c, g, or t
  misc_feature (993425)..(993617): n is a, c, g, or t
  misc_feature (1022223)..(1022255): n is a, c, g, or t
  misc_feature (1051522)..(1051598): n is a, c, g, or t
  misc_feature (1188564)..(1189202): n is a, c, g, or t
  misc_feature (1191284)..(1191700): n is a, c, g, or t
  misc_feature (1224646)..(1225528): n is a, c, g, or t
  misc_feature (1229062)..(1229413): n is a, c, g, or t
  misc_feature (1328346)..(1328746): n is a, c, g, or t
  misc_feature (1354790)..(1354942): n is a, c, g, or t
  misc_feature (1376240)..(1377677): n is a, c, g, or t
tattttagcgttgaaattgaaattgaaatgatatttttaattttcaagtgattttaacagccctaactttagcacttgaatttgagcccccttgtgatggggctagttcattcatttccattatctcagatttgattgaggctaactatgccactataccttattgttgtcggccccgataggaggattgattggaactcgctacgaacacgaagaaaccccttgaaaattgaaaagttcgcggcgctataattgattctaacctaattgaaataatgccatccacataaatctacaagctccataagccgagctaacctaaccgagttctttggctatggctagatcgcttgctagaacgggctaaattggcgttgactagggaaatgaccacggcccagatcggaaggacggtcaaaaactgagaagtctcgtcattttgtctaaaatcaaaggtcttcctcttggttaccgttggaagttctgccaagagtcttgacacaatgcatcttgggaaagggctctggctagttggtcaaattagccttcttgttcaagcttctcataatcatcatggccaccaccaccaccaccatgcgagatcccatgacctgcacatacccgagagtgcttctcatgtgtctggatcagttcatgcagtgacttcaagtggtccatatgcagctggggaaacctctgacgcagctgatgccgttgcacgggctctcaaagtcttgaaacagagaaacaagcttcgccttgagaatgtccagcacaacaactacaagttaagagctttctctgacaagagctctgatcccaattctcgtcccctggactacagcccgaaggctgcagaaacctcgacggattccaacaaccagaccatccgcagatcatccgacacaaaagagaattatggatactcaattcccccggaactcagagaggctgctcgaatccttgccgagtcaacacccccatctccatcgacaggaaaccatagtgctgtggcggccttgatgcgcgaaaagtatcgtagcgggataagcgacacctccattcctctgcagagctatagaacctacgatggtttatctgatattgtcatgcaaaataaccaatcagtaccttctggaaattctattcctgaggaaggactcggaaagcgagcaagctcaagttggtggatggctacaatggtccaacgtggtgccaatccgtacgcaccatctggttacaaagtatggttgctgtttatcttataacccatcaacataccaaactaacgttatcgaaggtttggagaaatgtcaaagattatggagctaagggtaaagaaaaccgcattctttaacttattctgatttctaattgaaaagtttaggagatggcgttaccgacgacactggttagtccaaaccttttcctttttttccccggctttttcctttcttgggtccctttgctggagcccaggaagttcagacaggaggttaattcattatttctagcggctatcaaccttgctatctcagatgggggccgttgtggtgccagctgcggttcaagcacgatataccctgccgtggtctacttcccgcctggagactacctcgtcagcagtcccatcattcagtattttaacacacagatcctcggtgatgtatgactccccacctgggcaggtgattctcgttcctaggttggaacttaagaaatccctccgttgattatctgcatgtgggctaacctctctgtcagcccatcgacctacccacgattctcggtgcatcaagctttgttggtcttggtgtcattacctctgatgtttacgtcggtgatcaagaagaatggtacattaatacgaacaatttcctccgcagcgttcgcaacttcaagattgatatcacccggacggaccaatcagcctatgtctgcgctattcattggcaagtcgctcagggaacgtctcttgaaaatatctacttctacatgacccaagatgcgcagaccactcagcagggtatttatatggagaacggaagtggcgggttcatggctgacttgacctttgttggtggcaactttgggtaagaataactaaaatgccttgagttcgcctttcatactgatacatgcatttcaatagtgcttaccttggcaaccagcaattcacaaccagtcacttggtgtttgtgaattgcaacaccgcagttcaaatccagtgggactgggcctggacaatgcaggatgttattgttgaaagctgtactaccggtattttgattgtcggaggagtaagtgtcaagataagctgactttgatgaaaaagcaaagcaatgctaacaaggtcctataggcaggtggtccttacagtacagggcagggcgttggctcttttgttttagttgactctctgattgccaacaccgctactggtatcgtcaccacactctacaatgagaactcaactgctttgcttttgcaaaacgttgggttctataacacgcagaccgctattttggataacaacgtgaacaaggctttgatccctggaggcgaccagaccattcttgattcatggggcttcggaatggtcaatgacccagacagtgcacgttttgtttctggcgcgaatttgctcgctatgaacaggtcctcttcgctcgttggtagcaccctttacaataccaagcctaatttcttcacccgtcgtcgtccgaaatatgacgatttggggaattctcaggtgctggacgtcaaggagctcggtgctaagggcgatggcattcacgacgatacgaacgtgctaaactctatcctagccagagctgctaacatgtcgtctattgtatacttaccgcatggtgtttatgttatcaaagacacgctcaacgtccccaaaaactctcgcatcctgggtcaagcatggtctcaaatcatggccacaggcgataaatttgaagatgtgaaaaatccacgtgtcgccgtgaaagttggaaaaaagggtgatgaaggcattgtcgagattcaagatctccttttcaccgtatccgggcccacggcaggtgctgtactagtggagtggaacatacgcgagtcgacacaaggctccgctggactatggggtaaagtctcctagatctattggcgaatctgttacttgatcttcctactgacgtttacttccttacgacagattctcatttccgagttggaggggctaaaggctccaatctacaagcctcagattgcccaaagaacagtggctcggttaataaagactgcattgcagcgtcgctgatgcttagattgactcacagctcctcggcatatctggagaatgtctgggtctggactgccgaccatgatcttgatattgcgtctcaagatcaactggatatttacgcagctcgtggcattcttattgaaagccagggaccaacatggctttatggaaccgcctcggagcaccaagtcttttaccagtatgagctatatcaagctgaaaatattgtcatgggaatgatacaaaccgagtctccctacttccagccattgcctgctgcacccttgccatttacgcctggtctattccccggagaccctgatttcacaaactgcacctcatcctccaagacttgtggcttctcatggagtatgcggattttggactcttcaaccgtttatctccttggcgcaggtaagttgatggcgagaacacttggccattacttcaggctaacgattcaacaggattctacagttggttctcggactattcgcagaaatgtgtcgatgaagagctttgccaagaccgtgggttccaaatcgaggagagctatgatacatggatctacaatttggtcaccaaggcaatttccgagatggtgagcccgacgggtgaaaccccaacttatgctaaggacaacaagaatggatttttatcctctttacttgcttggatccgaggctcgaaggtggtgattggtggtcgcgacctcccaggcttttatgtctgggacgctaatactgacgcggatttgatgactggcctgcctgattcctgcaaaacctcactcacccaattagtcggatgtgattcgtacgcgcggctgtttttggctgagagttatcggggatcattgggtaatgacactctcacagaatcagtctgtgatgaaagttgcggcgtctcattgaagcgctggtttgataatgttgcttctgactgcaagggatacaatgtttctgattccgctgccaccaaatatggtggacagatctggtctggctggaacgaaacctgtctcaaagataccagaacgggagaatactgcaatggtaagggtatctcgtgctcgttttctaagtcgctagtgctaatgatggcagatttgatatccgaatatccagccgttgacttcctagatgacatgccggaatcggaaatctgctcattctgctttgtcgagaggctgggaattatgcagcggtcgtcatactccttctatgatgaagggttccaggatcagttgggtaccgtcaatgctaaatgtggactgtctgttccgacagccaagcccccatcgctagatgcaccccctgagtttctacctgacccaatctgcatctcgaatcaaacgtatcagacagtctccggtgacacatgtgactctatcgctttgagatacaatgtttcatctgcttccctggtcatggcgaacaatcgccagctcatggtctgcaacgacttgactgcagagatggatctttgcataccaagcagctgtgcatccacatacaccctcaagagcaacgacacctgtacatccatcgaatcgtcgggccttcgccagcgtggtgatgtgaggaaatacaactcatgggttgaatgggactgctccaatcttcaaacatcaactgacttctggggccacataatttgcctcggcgttcaaggaggtacatacactgctactgcctcgattccgggagttactctagcccccgaagagagcacaggatattcaaattcacgcgtcgcgcccccggccaatgctactgccgctgaaggtacaaccttgaagtgtggcaagtggcgcgttgctgtgaagggagagacttgtgcacagatctgcctgcaagaatcaatcacctcaagtctatttgtcggagtgaacccgtctctcgcaagttcgaattgttccgacggtttaatcgttggaaatgcatactgtgtcggccctaatccgggatggtcgttctctaattcgactacttccttaagcacccaaggaaggactccagggagcagctcaatgccagtttccgcagctattctttgagatctactcccgcgttcagactttttctgagtaatagctcgtgacaaatccatcgataatcctaggtagacctccctactatagagactagatgtgattttcaggcatgattgtgcccaagtagccttcggggaaactgatagtcatttggtattcgaggatatgccactgcctccaaacaaagatatatgagacccagatacagctgcaatttgaatgttcaaaatatataatgatacttctaagtaagtgcacacttggaggtggaatcggaacagcggcatcgacggtctcgatgattttcgttatgtagataaaagacaaaaaggctaccctctcccacacccttgctgcgctgatcgcaccgggcgtctccgaccaaagtttttaggaatgaaatttccatcttgatcctgcgctgtcccatcgccctcatcatagacaggaatccagccatccggcaccttcggacatagctgttccatttgatcgaattgaagattcaagtaaagaggccacagtgcgcacactagcgacctcataaacccacggtataaaggcgaatcatacctctttgcggtatcataccgtccatcaactaccccaacgaaacccccgtgagggtcgtctgtcttaacaagagagttaagtgatcgctcatcaatcatcagacagacagcaaagcgagaatcatcacaatgttcctcctgcttaattttgcgcagatactgggcaaaatgagcacgtacttgctcaatactagcaccgtcccaacgccctgggtcagagatgatgacatccttatgagactcttctatcaactgctcggggcggggatcattcccatagcgtgtctcatggtgtaattcacccttcatccattcgtgcatcacgcggatcagcttttccttggcgattggccataattcctcagactcaggtgtgtagactgttcgatagataatatacccccatggaaaatgatatggaaattgtttagtcaggaatcgatgggtgatgcgatcagtcgtgcttctgtaccacggctctttctcccaattttcggaggcctctttagtgaaatcgggatgatgccagcgttttggccagaccgggtgatgatagtgtttgtcactatccagttcctcgacctggtcgtttggatcattgaacggggcagattcggatgaggagggcggggaattcatctgtggaaagtgatacaccacataagcaaaaagaaggagaagaaacaggtagtaaattatagagagtaccatttcgataggaacaggaccatgagatgctcaggcgcgggtgttggagagaaaagttgaatgcctcaagaaaacaagaagagaagaagctaagaaacctacagggctgtgagagggtttaaatagttcaggcctacttcccatcggccaatcatatccagacttcgtttagcgcggatccatccttggaacgacgactcttggcatctgtttgatgggtttgcatgcttccatagccccgtgcagtaaatagccctcaaatccagtcttcatcatagtgctcctcaacttgcatcattcctgcgtgaaataccagtcaattttcgtatcctcgctcgaactagactgcctaccaccctatcccatggggttcattgatctgagcccccaagtcataaaaagatcccaaattggccaattagattggaaaggtatacggtatgcaggtgtaaggcctgtcaaccaggtaagatacaatggtccaatgagggagagatctggaacgatatgtatttgtcttctaggtgcaagactaattcttgtcagatctgtcctggggtctgaggacccttagttatttatgacggaactatggtggggtaaggaaacgatccgactgcgggacgatgccgcaaacggctcggaccaccagtctttcaccgacatgtggaatggtatcactgctgacatgtcgttccagtattgtcaggggtattatccatgacagacgctcacttatcctctaagtgcaagaatagtacaaaatcctggtcagattatactttttcttggtaaatcctatgcactctactctatagtgtagccattattttccatgacttttattaccaggtcgttgccgttgaatcttgttatcttgcttcttggagtagttgaacccccggattgggagttgaacccccggattgggccggggaaaacctcgggccgagatctggacttatagactggaacatgcacaaaaaacagacattaatcagcagggttatgaatgccaatattgtagttgtgtgcatagaaatgggcttgtttgggctttgctgaagtctagtgaccatcactcaacttcaccgcctggccatataccacaatacacacatcaacaccctcgtccataatatcgtcagcgctcatcaacgaccatcaacgcctggccaacacatccactccgcaccaaaagactcaccattttgttcgctccaccccctgatggcagatacattctactgcggcgggaagactagccgaccgcaaaccatgaagacaggagggttgggaatacggcactcgataacgaaggttggatcttgaatttacgattctggtgattgatttgcatctatctagggctgatttcattcctccaatgatgatccttcgaaatacgaaatagatcataaagatgttgcgcagatctttgcttcttcgagtactgttgaatactcgaatactggtccctagcaccgcgaagaggtgcctgcacatcgctagaggccttgttaacgcagcaatcccctgcggggttccttgttctcgcagcgctctcctgcggatgtccttggttgcgcagcgctcccctgcgaagattcttgttttcgtagcgctctcctgcggaattccttgttgacgcagcacctccctgcgaggattgttgttgacgcagacctatcctgcgaagcaccttcttacatcgctgggctcgtggcagcgacagccgtggccatggagactctcaagcccgcaggcaagagggacaccatgacacatcggagtgtgaggaccgaagtcctgattttttttggctgggaatccggctccttatataatttttcggctacgtttctaccaaggaaccagttgcgcagatggtagcgagaaccactgtctcgttgatgggcgttgaagcgagttaaacgacgttgcaatggtctttggagactttgtggcctacagagtcaagtttcaacctggattcattcctttcaacaacctgcgttaagtgtggctaaccacttcatcaactgttgaaaagacagtgataccgcaagaaaatacattgcaattaaattgctcaacgcggtggcactctacatctgcccgttctagccacgtcgctcgtctctttcatgggggttgaagtgcttcaacagaccccgcaacaatgggttggagactgtggcagacagggacatccgattgtaccggctgttggccataggacgtgcctcccattgatcccactagaatcaggtttgtctatctcctagccccgcgctgctttaccggtactttttttctgttgctcttagccaactgatgttgcctttactagagtttttgctacctagcgccttaggcattatgaacatccttatatatccaggatgttagttgtattctttgacggagaatacaaaagtctagaccctgttagaaagcctagaatagaaacccgagtccagttttccaagacaatgaaatgagttatttcagctaccatggccacgagctaggtcctcgtgatcgccatccacatcgtgagattgcaacactactgtcccattgatgaaaccctggacacatgaagcaccggttgtatcaatcaaataccaggcgcgaatttagatagatacagatcccaggaacgacccatgggacagtagatcaaggatattctatttgtggcccagagaagaatttggaaggacttacaagggtctagacacaatccacaaatctagtcttgacgggccgtcagagtacagatagaacaggcctttggtacttaggggtcggtcggggcagataacgtatttggaatatcgtatagacttttagcaatagagatacaatccgccgaaatttcgcagaaggggtaagacttctccccattcccttctcttaatcaattcgttatcttattccaattctaggggaactttagacagttcttagcgtaaatccttaggtcattcaccggaaccccgacctactcagtgagaattgcgacagcttcaacccagaccgctggctccagaaagaatcgggacgaatagatgcctttttaatccatatatgtatataccccctccgactactagtttgtaaagttaactaatgaccatttcactgttatagtggggggctggatacaacgcatatcctaggcgcaatttcgcgcaatttgaaatatccaagcttactaccacttttttctaagactatgacattaagcaagcggatcctaaggaagagtagatatagcacaatcgttttatttacataccgagtcgttggtggagacgatgcaccaggttacccatcgaagcttccccaacctactcgagcattatcgtcatagaggtcaggatttcctggtgtgggaagcggttaagttatccataggccaggtactaaggtcgcgatactccatcgacgaaggagccctcgccgcaattgtttggccggtaggtatagggcgtacaggcggtctccctcctctttctaaaggaaagggtcgctaccattaagaaactaacggctaataattggtaggtcctaaaataaataaagcatctccgtagatagggcagagtactggctaccttaagcgccgacacaatttttctcacagagtccagtatcgtcaaaattggtaagtaaggggcagtctagtttacaaacaccttcgggtagtgatactaacgaggaatatatagcgggggtggagcacagttaccaaatcgacgcgactgagatagacgctgtaaccctgaagctgatagccctggctgacatggtccaaaacttgataacaagaagctctccaggaacaaaatggagccctaaggcccagagtctccccaaggatctgaaccgactgtcggttaataagctactacgagtaagtataatcccacctgtctatcatacaagactgcggctaaccaggcagagtaaattctttgagcaattagggtctagggaggaattaaaaatactagtaaacgtggtaaacaaagatacatgccacaaaattgattttctcggttacacataagaagcgcataatattcacgcgtatatatccgtgcggaaatcccatcgtgtggatgttctttgccgtaaatctaactgtaataggattatctgcgtagagacctctggaatactttctaaggtcactcaaattagtcactggagtaaattccctacaaggtttctttctacttgattttttggggttatagggtattggttaggtcactccccacggcttagcattagtaggcgaaacccttctcttaatccgagtatatatatatatatctctataatagtctccctttacttttctgttcaagaaaccaaacacacacttgccgtttctaacacagtttattcgcggctgatccttctcagaagacttctatctcatcagtagtagcctatcaacgcgtaaaagcacataatggtcgtgatacagccgtgttttcactacaaacaatataagatttcctattataggggttcaacttgggatccacccactcctgcttatcgaggttacgataagataagtaggctcaatcagataagtgggaattcctacagatactcgcatctgatatgcttacaggacataaaaaacaaaacaatatatcagcaagtcagcctaccagaacctctccccaaggtttacagtgccacttcgcgagatatctcctgatatcaagtccaatcgcgttcttccgccggcgagctactattctagttcccatagctttataaagccttcatcgcctcggtgactcccgctctgacacacgtcaattcagtctctagccgactagttcggagcgagctagcttcaagctcagtccaaagccgacgagacttttcctagaaccaatcgcttttgctatacacgtcgtctagccaggcccgagtataaccgagctccacccccagctcgcagttcgcgccttccagttagcggatttttgctataaataacccgtcttcttcctcatacaatcttacatcttcctatgtctttgttgagtgccaggaaaactggcaggtataggaattctcatatcttcccctagatcaccgagtcagaaccctgcaaggtctacggtacaactgcttcaagcgaccggcccaattcttcatatatagcccgaaatagaccgacagatccactactttagctcgactgtaataacaatttcttagattccgtcactaaccaggcgtatctgtcctcaactagtagctggaggcgaacttagctaggagcaatattaaggccaagtcgattatctggattcattagttccccctttccgtaggatatataagacaggtatggatatatacagacagtacctctcgacattactatcttatcgcagcacgcgtttcattacttttaagagctatttctttgccctcccatatatatcaaatatacgagaataaatagccacagtttttataactaactataaaagattctatctccaggtcgttatatctataggattcggttgacagttcgttaaatattatctattaaagtctaccgaactgtaagtcttcaaaaggattaatagataaacgtattagagtagagataaacggattttaacggtaatttctaaagagagcagcccttagtactacagctttaactatatactaatagctaatagcctctagattaaatataaacgatagctcaactattcggtggtcttagactaacgatcagtgatcttatgactaccaaataaggtaaagaacgttaagaaatatagataaggctaaattgtatcagctacatatataagataagatttggctattagtctgcctatataaagcagagggctattaaaggcctacccctatagtcgaagtattacacaaatattaacatatagtttattcttagttaaagcagacccagctatccccttccctatatcgcttaactagtttggaatatctactatttgcctaccaccgaaccaataggtttcagattgatgcaaagccttgtatcctttaggagctcctcgataacttaataatgcccgttggaatcagcgtaccacattaaactcttgcccgacttatctacagcattgaggtctattcgggaatcctctaagatgaccttcacggtgtgtagataagctagcggccgttgacagggcgctttcgccatctttattgttttgagagttgatattcaatcgtttgccctgcttcagtaggagactaactaccttagttctaccacacttcacagtaagccaaagtggggaatcctcccctgggcggactgcattgatttggatatcgtttctctgaagcagtaatttaactatgtcaacattactgtcatgtgcggcgtgaccgagaggtgtccaacggaaagacccgaggacatttagatccaactctggatttttaatggcgtatctgactacgttatacctaaaaaggggaaacaactagtgtggattcgctaagatctaaatggacgagggagagagagagagaggaagagggagcggaactatctaataatctgggtccatataggtgactgccttccggtcacccaacatcccccctatagatcttatatctcctattttaaaaataataatcttaaaatgttataatcgtggtagttataaaaaaccccaaattttcctttaaattaagttatcctaataagctttaagaaagctcggaattactctttaggaagtgcctttataaacctgtctgccgcgttctgctttatattaacccttaggatatttatatatccttaggccacagcgtcctttataaagaactatcggagtacttactatctagtagtagacttacctcccttctttattagtagtaactgtaaattaatattattagtatagataactataggattaggtcttagtaggcttagtaagtctataaccttagtaagctatatagtatcctaggccggctaatcgagtatatactattctactattattatagagttcgctgtgattatctactttttagtagactaagctactaggactcctataaagaactagatatatccttcggttaatttagagtctatttagtctatatataatatatctataaatactataaattatagttcgtctaactttctaaagattagtcctatcttagggttatatctaaggtacttaataacatatcttattaccttaagattagaaaaagttggtattactagtctatattataggtatataacggcgaatctaatatctggtcttatcttaatagtaagctagttgagtatccctactactgtttagtagtattcgaagttctcgttatcgagtaggttagagttaatatcttctaggttagactctctctatcctagtggtagtagtgtttctttcgttcccatagtatctgtaatatatagaatcttttgtatataggcttcttaagatatgataattgtcttagcattataatctctattaagttgtaacgggctagagcccgcacaggatcacgtaataagcacgtgaccttcgccacccctgttttctcctgtttcttcctataagcttcatttcctttccttaagcttttagacaatagcaaacggcttagttagcttgaattctaatctagctctgtcccttcatattctaaaagcttccttttccgtagaagattagaagagtacagaaggatataccgacgaacggcataataaacgagaatgtagaatggtcagaaccgcccgaatgggctaaagtgatgatatagcgattagtctagtctactacctcctaggaggagatcgcatgagtataagaggaaaggattaagaagcttaaagagctagtctagataaacgtgatagcacaagaagaatctaataagaataacgagactaaaaacgaacctacctaggggttatcggaaatgagataaaccatacaaccatggctatacctccccaacccctataagacccctaggtatggaatgcctaagggaatgctgtatgtaatagaggatcaggaaatagagatagtagtatatatagtggtatattaggaactaatagctgcttctctaaagaagcaccatatgaggataatatataggttataggttatatgattaaagggggctgtataggcagtatacacggctcctgcctagcctatagttccctatataccttaataggtataataccttaggtattagccttcttagtactagggtcctaataatatccccctccttannnnnnnnnnnnnnnnnnnnnnnnnnnnnnnnnnnnnnnnnnnnnnnnnnnnnnnnnnnnnnnnnnnnnnnnnnnnnnnnnnnnnnnnnnnnnnnnnnnnnnnnnnnnnnnnnnnnnnnnnnnnnnnnnnnnnnnnnnnnnnnnnnnnnnnnnnnnnnnnnnnnnnnnnnnnnnnnnnnnnnnnnnnnnnnnnnnnnnnnnnnnnnnnnnnnnnnnnnnnnnnnnnnnnnnnnnnnnnnnnnnnnnnnnnnnnnnnnnnnnnnnnnnnnnnnnnnnnnnnnnnnnnnnnnnnnnnnnnnnnnnnnnnnnnnnnnnnnnnnnnnnnnnnnnnnnnnnnnnnnnnnnnnnnnnnnnnnnnnnnnnnnnnnnnnnnnnnnnnnnnnnnnnnnnnnnnnnnnnnnnnnnnnnnnnnnnnnnnnnnnnnnnnnnnnnnnnnnnnnnnnnnnnnnnnnnnnnnnnnnnnnnnnnnnnnnnnnnnnnnnnnnnnnnnnnnnnnnnnnnnnnnnnnnnnnnnnnnnnnnnnnnnnnnnnnnnnnnnnnnnnnnnnnnnnnnnnnnnnnnnnnnnnnnnnnnnnnnnnnnnnnnnnnnnnnnnnnnnnnnnnnnnnnnnnnnnnnnnnnnnnnnnnnnnnnnnnnnnnnnnnnnnnnnnnnnnnnnnnnnnngaacttaggtatctcctatatataagggtatagctaagtagttatttactagtaagagaatatagttaggataaaggggaatactatatatatatatacctaggttacccctaatatcttcttctcttctttaaccccctatcttatttacttagtaaatatacctaatttatatttctattaaatttctattaagataatattattctaattagggtactactattagctagtaaatatagtaaatatatctttagatttagtagtattatattctatatagtatactaagaaaatttaatattatatctatcccttccttatagaaaacggccttatttatatatttatatactaattatatttatagaataataatagtatattattatcctatactatcctcctctaaggaggataaatctctatatctataagtataatattatcttttagtaggctataggtctataattctatctctatacttagaaacccctaagcctattaaagggctattaccttactagtagtactttttctagctataaagctacctagactataagtataagatccttataggttatattaaatatacttactactctttagtaaaatatagttatatccctataagtttaactatattattatagggaggaatttattattaataatagtatagcttctttttaaggtttaaactactacctatactacttttaatatattacctatatatacttatataccctaagtatatattattaagcagaatattaagcacttaatctatatagctaataaagctaaaaaggctactactattatagaagttatagaagttattagggtcctaagaattgtagaaaatataggagaaatctctaaagttaaggaattctttaatactcctactagtattctagaggaaagtatggttcctaatataggtatacctagtaatactttatttatccctaaaaacttagtccctacttcttagggtatcttaggtatagagtctattttactactttattatatttttaatactactttattagtatttaagtctagttaggtatactaaccctacctatacctatatataaattctagtaaatatagggaatatagtactaaattttaatctataattaaagcttcttatattttaagtatatattcttagtccttatcttttttagtatctttactactatagttatcctagccttatagttattaaggaccttagtatccttaactatagactatagttcctagattactttaatattattatagctatactacttaactaaataggacctatttttcttactttaatagaataggatatattcgatcttatattctacttaattattaatcttaattagtttaggaatattattattagttagagtattactataatataattctagtactaatatatagtatattaggtatagtaatttaaaatagagggatagatatagcttatatacttatatatcgaccttcttaaagattagaaatagacctagtattttataatctagtttcttacttagtctacctatttctatattcttactcttaagatatacctaattactaaccttaaataatttatctatataatatttatctatataatactttattaactcttttaccttagtaagtcgctcttttataaagctccttatttcttagatttcttataccctctatatagtatctatatagtactctttagggtactctttaacgctatcttagataaataagttatatcctattaatactttatacagtgactttctagttatactataagttattatattatatataaataccgcgatagggagctagtatacccagttatcttattcctagttaatatataaccgtaggaagtactctagtacctagttttaacgtttagtctatctatcggtttagaggtagaatatagtagataactagtatttaactataaggagaaagtagaaggtcaactagaactagctagtaaaaaggctacccctattgcttactagattctctagtatactaaagatcgggctnnnnnnnnnnnnnnnnnnnnnnnnnnnnnnnnnnnnnnnnnnnnnnnnnnnnnnnnnnnnnnnnnnnnnnnnnnnnnnnnnnnnnnnnnnnnnnnnnnnnnnnnnnnnnnnnnnnnnnnnnnnnnnnnnnnnnnnnnnnnnnnnnnnnnnnnnnnnnnnnnnnnnnnnnnnnnnnnnnnnnnnnnnnnnnnnnnnnnnnnnnnnnnnnnnnnnnnnnnnnnnnnnnnnnnnnnnnnnnnnnnnnnnnnnnnnnnnnnnnnnnnnnnnnnnnnnnnnnnnnnnnnnnnnnnnnnnnnnnnnnnnnnnnnnnnnnnnnnnnnnnnnnnnnnnnnnnnnnnnnnnnnnnnnnnnnnnnnnnnnnnnnnnnnnnnnnnnnnnnnnnnnnnnnnnnnnnnnnnnnnnnnnnnnnnnnnnnnnnnnnnnnnnnnnnnnnnnnnnnnnnnnnnnnnnnnnnnnnnnnnnnnnnnnnnnnnnnnnnnnnnnnnnnnnnnnnnnnnnnnnnnnnnnnnnnnnnnnnnnnnnnnnnnnnnnnnnnnnnnnnnnnnnnnnnnnnnnnnnnnnnnnnnnnnnnnnnnnnnnnnnnnnnnnnnnnnnnnnnnnnnnnnnnnnnnnnnnnnnnnnnnnnnnnnnnnnnnnnnnnnnnnnnnnnnnnnnnnnnnnnnnnnnnnnnnnnnnnnnnnnnnnnnnnnnnnnnnnnnnnnnnnnnnnnnnnnnnnnnnnnnnnnnnnnnnnnnnnnnnnnnnnnnnnnnnnnnnnnnnnnnnnnnnnnnnnnnnnnnnnnnnnnnngaggactataataatatagtatataagtcctataatataagtattatagataagtattatattactagcgatataggaattctagaccccctagtactatacctaatagctataagagctttttaaggtaaaataatatatatactagtactaaagaactctatagtaaaattactctatataacacaggatcgcgatctaacgtcgcaggacatctatataaaaatagaggaggatagtattagtaagtaaaagctaagtaatacaccctagggattaacgctaaataggctacttaggtttaataactatatttatatcctaagagagactacgatcttatataaaattataaagatatactataataatccctagggaggctattatactagtaaatataccctcgaagctatttagtataagttctattagtatagaattataaaggatataaggaagtatatatataactatataaattattaatataattcagtatataggtataagctatatagattactatagctattactagtacctaaaaggcctagtaagtagcttagtatagattttattactagaatacctttattatagtagaatagtaaggtatataatatagtattagtcttaatagatatatttactaagtatatcctttatcttccttatataaaagaaattaatatatctaagttagtagatttattatataaatatataattctaatctttagtatactaaagaacctagtaagtaatagggatagcctttttactagctaattctagttaaccttctacttccttcttataattaaatactagttatctactatattctacctctaaactaatagatagactaaatattaaaactaggtactagagtatttcttatagttatcttgctaataatctagaccttcgactatactccattctgccgggccttcgacgtgtctgtggctcagtgcgcccccgctctagtgctaagagcatacgcaataaaagaccaaacttctcggttgcctctggatacgtaagggacaaaattatacttttggctgagggattggctgttcatgcaatgatacagggtcattttctcgacttagtcgtcttatagatgagcggtggttgtccacccaaaaaaaaaaaaaggcctccctttccgggaaaccatttatcgcgaagtaaaagtgaacttggtgaaatgttaactaagactgacactgggaagatggagcctttagcagtcagtatccctcgccattctagaaccaccgtaacactgacatatagactatgcgtatccaaacctccctaaattgcgatctttacactcaaggctcgaacggataccatgccctggatcatattcaattagagattcgatcagtagagcacggccttcatgatgcagtcctcctggccattcctctgggcaaaagccagtttgaccttgcagttaaacaggccactgtcaggcaaatcaaaaaccacttcacagacctaagccactcgcgtctagtgagctatgatcctcttttcgcagccgaattcggtcgttcctttccagaaaccgcattcagtgctttgacgcaaatgagatatcaatacaacctggcggcgagttcaattcacttatctaaggacccacgccttatcaaatggtttaaggctgaaatcaaacgcattgaaattctcatagatgagtaccgacagcagtgtgttaacctgggccgaattccagattgtgtcaagcagcaatagacgaaactcaatcacgtctgcaaagctatcttctacatcttgcctaattaatcatcactgtaatttaagatactgcatgttcatactattggccctttcccgtatgccagtcatcgcgcaactgcggagaatttgctcaagcacctttccaggggctcgtacgtttcgagcgtaggcaaagcatctatacatatagctagcctcctaagttaaataaaattataaactgctttcgcgcagcgcagaacgagagatttggcgtgaagaatgggattccagtatcatgcgtgaccatgtgtcagcaagagttgccgcaatctgcatattgcatcccacgatggcttggtaactgataccgaatttcgagaatttcctggtttaagccctgaatgaactttatcattgatcttctagcgatagcttgacatcaggttgaatcttgaagaaagcttgaattattcgggcggataaaggccttcttgcttcgtaaaatctttctcaatgtgacgtatttcttttgggtatgtagagcaaagtgagtggcccaatgttaatccggctctagtttaataaacgggcttagggccaggtgtctatccctacgagcacagcctggtgatgatgggaattggacctcaaacaagggagccggcggtcgccctggccaagtttcacgctttgccctttctctggtccacaagcctaggtgtcgagtagagttttccactgaagtgatcaggagattgagcaagtctagtaggcgtgaaccgtcgagcatagtcatatgtcatccagcgagagaactaggtagatttgaactgtacctcgtagggatgtcttatcaggtaactcattattccaatacattttatttgtatattgggtgagaagcctcaaaaacagcaagatgttgggttttcatggagtcggcgattgacggctccagtacggggccatcggcggttcgaacaagcgtaggccgaaagggaacgtctgtatgctccgacatacaatacactacatatgctgtggtggaaagactccaagggccaacatatgggttcccaggagttaacggatctccaggaccatcagctacgttcctaggaatagatgctgcgttcctggaagtaaactgggatctatgaaaccacatgccaatcgatcgattaattgattcatagtctgtcccagccttttggaaacattgccagccacacttggacaacagcaagaccatcgttttatgggtctggctccatgaccgtgtgtataataattaaacacgtggaactgaacaaggatgggaattatagaagatgagaattcgtgaagcctcaggcagcaagactactggaaggaccaggaccgtggttctgaatgagctttttctaaaccgcgaacttgaaagtatccttgaactccaagtagatatatgtgataaccacagctatatttatatctgcttggttaggatttcgctactagtctagaatgtctagaagcttctaaatatatatcagctatattagggttcttatagttgtggtcgatagaaagaactactagagaggcgagataaccgaaccaaggaggtttataaatatagctagcggaaggaacgagccggtcgggcggttcaggggttcgcgtcgcggtccgtcccgccattattttcaaaatcgattccgtcgccacgtggcccaaaagacattaagtagctccgacaggtttacttgcatagaccgataccccagtttgtcacccgataaatgaggtttctggactctcgaggtggacaaagcctctctcaccccgggtgtctctcagtttgctccttaggcatacatcacgggcaaatcaactaggacgggaccgcttcaaccaggctaacctgatctcaggccctcagtgcgagtgaggtagttggttcccggttgtttgtacactgacacgcgcatccgtcctctcaggctatacagacagtctcttgacaggccccgaccctgccgcagtggctgccattgtacaccacgccccgcgagagccttcactctcgtttcgcgttacctgaagaggtctccccccgccaggccgaccgtgtcttgcgaaaagtcctccatgcgctccatcgggcagtatatgtcggttgctctccactaaccaagtttggtccccggtgtctggacagggtcaagacagagcgtggaaagcaccacttggaatgttctactgagctaccgaatttgtaaatatgatcttagattctcttagcagcctcatttaacgcgggccattatccatctatgatgatgtcgcaaaccccaagaattatgtatacggacttgccccagtggttcacattgcatcatccctgacgagaataaccgagcagttctctttgagaaagatagtaaaaatgacagtagaactataattatcgcaagccaccaggttcccaagatagcccctcgagttgagaacagaagttcaatgaaacctgctcatagctcagctccaggttacttacgacatccctcactgcagttgcagccaagaagatcacattcttttttttttcttttcattagtgatcgacccaaattcacgagttccatgggtttacttacttcctttgccacaaaacgggtttggcttcgatccatctgcgcatagtttcttgcaaatttcagtgcccagggcgtctgttgagcagtgtctcttgcccactccatgacagcactccgccattgaaagatgcgctgttgcaaggaaaaggaggcaaagtgtaagaactttgggtacacttatgacaaacatcttgaaagtttggtctaaggaggtcagttggtgtacagactggggaaatgctgtgtatataccagtaatgaacaagtgtacaatgtcttgtcgaaaacgtttttctctgttggcttctgcgaagatcaaaagtgatatgttttcctttcatgtcaggtagtctctgcttcttattgtcactgtgtctccccccctttggtcccctttctaggagataatacctgaagatccacagccctctagggatgatatcctgctagagttaaagaatgccaaggtctgaatagagtggcatttgctccgccgaagatggaataatccctgtgcgatccccaatgaggatatgctctgaatcattagaagcaaaataactctatcttagagatcttattggcatatcaaggtatgacatgtacctgttcaactttgataacgcagaagggatggcattctaaaggttcgctatttgattgagatcttcaaggaaaaattacatacctcgtagcactggagagctcttatttgaccaatgctgcatgcacaccatcatggctcttttcagtggcgttttacttgcaaaacaaatctacataattcatgtctttatcatcactctccacaaggcttcacatcgtactctacgtcagtccgaatgatatattttgctcccttcctcacccctgtaccttcatgtagcaaggccccattcgactccccatgagggaatatcgcaacagctcccatcacaggtcgcaccgggtatccgttgagggtcccttcccgcggggctggcatgaagaatgtcgtctctccgccctcaaactcatcattgagatatagtagaaatgtgtacatcgagctctgtttcttttcctcaggcgaagagtcgtacacgtatgtgtcatcaggaagaataccggacggcggccaagctccgtcgatgtgacaccgatattcggctccgggaacatacctgtacacacggaagcgacgattgatgcctcggaccatgcgaccattgatagagggtggcacataaggggaaattcgtgcccaaagcatgtcgtggaatgtggtgtcaatgatccagtaaaagttgtgggctaggatgctgatgtccccatcctcgcgaaggggcgcgtccggcaggaaattaacagattcaccggcagcgatgatcgccttgcactcggtgggggataggacattgagtgcaaggccaaggcctggcacagcgggatgtgcgtggtatgttatggaaggaccgacaggagccagtgggacggcgttcggcgcggtggtatagagaatagccggatggtggtttgggggtttgcggagtgggccaggggtttgttcgatgatgcggagagcagatggagacttgggtgcctcatccaaaattgatttgtcaaggactgaggcgtagacgggaagtggcgtcgtcgaggggcggaggtcccagatggactggaaggcgatgggattggttgagtcaacggcgtttgtgttggtgtcaatcggggtgctgacgcgcaggatggcatcaaggacgcccaggatttcgttttccttcacactgcgctgaatggagacatgatcgtgtgatttatgctgcgtcgagaggccgctgacgacatccagatctcgcacccagcgacacaatgctccaatcttgggttgttcccccctgatcctcatctctgcaagcaagatcttggcttcaatgtatttctcgtccaccaatgcaccggttattcgagctgtcaagttggcgccctctctcgaacggttagcgacagtctttgagcaggaataacgcaacataccggcagtgttaacacccgtagtgcatgtctggcggaagtcatagaccgcgactcgcagatccttgcatgccttcgactttgtcaggcctggatattgtgcaagcgccgtgagcgtctcaattgtaatgtcgagttcctcgtctgagacgacggcattgagatgcgtgggctcgagaggtatgccatcgggaggcggtgttagattcggtactgctttcggaatcttttgtggaagatcgatttgtgcgttgcgcttacgctttgccgctttggacttggccatagcttttatgtagattgatacagagttcacgactttacgagtgcacgagtctgcgagtcttccaattcacggatattctgcccgaagattccgaccacgggattgcactcggattatataagtcacggagttttccaaggttccgcagcttgggaccttcagattatcttattcgccatacaatccaacctgaggtggttggtgatacattctgacatactcactgttgccctatgcagtttgtagaccttctttgtggcattccttcccttctctttgacttctctgacagacagcttgccgccaaacgtgtagcttgccgttcagcttgctgcgttgacatttcatttgtacgtctgcagagatgcttcttctgttttctggtagatgtaatctggctggcttcgtggtgtgaagctatatagacacagcttcaggacagtagctagttctccattttccatcaatccatcatctttccacttccagttgaccactccttcctctgtagtcaggacctttcatcaattggaaatcttgcattctgtctaattgtgaatgcctacatatagtaatgtaatctgtacatatgtccccgcacttattcttcggattgatggaacttttgcttggaattgtcgaccttctcatgtacagcacgtgcctttcgtttcgttttggtgtaaccttcaattccagcgagcatgatataagacttgctcatcgaaacatgggacatatcaacgccttgttgctgtagggcgtggtggaatgctcgaaaattggcagctggaggccgataatggccactgaacaggttagcctaccgtttcgagtaatgatagaagtcgatggatgaaagctttgactgaactcacctaagcggtgtcaggcttcgaagttggccatgtttgatcttaatcgttccagctgctgcgatacgggcacctcgaagaaaagatgaatgctgaaaggcacctgatttctttatgccgatgtatagacgaaaagaggtatctgcaacctaaggtaaatttggtttagtctgcatctaacaaccacggatccaaacctgactcacgaatagccagataccttctttctctgaggacttgccccagagtcgcttaaatgcagcagcggggcttgcgtgcaccacttttttcatcgtcttggcagtgtactcctcatcggtgaaatgcttcgggtcatgatttgagaggacatcgtcagggctgtgtcttctagacgttgttgatattgttgatgatgaacatgatgaacatgatgctgatggtgacaagtcccaggtggaatctggtagaactgtcgagtttccgttgaattgaggcacatcatcctcgattcccacaatcccttggagactatctttaaaacgtgcagtgtttgtccacactggttcatcgtttttggcccagcggaaacgtccagtctcgtcaactatcaccatgtaattcaaacgttcctcgcgattgagatagcggacttgttctttctcaagtttttctcgtggacactgtgaaagctcaatatttttcccatcgccgtagtccagccaatagaagaagttttcgttcgatgatgtattccgccaacacgtgtggtacgagcgcagattgcttccgtgtcgatgtttgagatcaaccatttcgagaaagtattgaagatccatcatcttcggcttagctccagtaatctctgtgttatgttctgatcgattcaccgtagaaggcgagacttccggaaaacggtcgtcgccgccgacgcgcatagcaacactaaccactcgttgccagttccggcgagcttgattggagccatcatcatcgctgggggtcacgctcggctcgggttgatggagttggtgccactgggcttctcgaaaggcctagagggaccaaacaaacaagatcagaatcgatcggtttcgcgcaaaatacacatgtcatacgcgtacctcaatccatctagtggaagcagccaagtgcagtccatgcagctctcgtcgcgttcgataaccacgatatattctctaccgatggtcagcggacatcaacaacaccggaattcctcgtgtacctgaaccgttcgcgcggcttgctccttatcgatgacgtcatgtgaaagagtcgaagtctccagaattttggtcatggacagaagtcaagagaatgcaaaggagaaagaaacccaactatcgaggagtcaaggaaagaaagatgagtctcagctggcccggcggggaaaggtcatggtcatctttgtcatctttgtcatctctcgttttccaaaagagaacctcaacgtctccgacttgtttcattacaagaattctcaagaattaccaaatagaagagaattggagagctgaatagacccctcatgacgaattttcccttctccccctacaaagaaacgatcggtatcgatcccgagactaaacaggaaattatttccccattcaggacccgaaccccccgcattggcaatctatatcgttcttagatactacgataatacgccggttacccctcgtgaggagatgtgaggagcattgatgttggagcttaccttacttataaatggagtcgacattccctctcaactcttccattaacctcgattatacccattcacttcactcttctcactatggcaccctctctccaccctctcatcgacaatggaatcacaccaggctccagtagcttctccggagggaagctgcactgccactgcgcctccaaccaggtcgagatcaccctggatagcaatgttgcccacaaccacgcctgtggctgctccaagtgttggaagccatccggttctctcttctcggtggttggcgttgtaccgcgagacgccgtctcggtgacagccaatgcctcgaagctttcgattgtggacaaggatgctaccattcaacgcaatgcctgcaaggactgcggtgttcacctcttcgggcgtatcgagaaggaccatcctttcaagggtctcgactttgtacacgtggagttgtccgatgaaacaggctggcaggaaccacaattcgccgggttcgtctcatccattattgaacagggtttccaccccaaagagatggatgaagtgagagccaaattcaaggccgttggactggagacatacgacgtgctgtcgccggcgctgatggatctgatctccacttttacggcgcagaagtccggtatcagatttgccaatttgtgatttagcgaaagtgttgtgtcctttgcatgtactagaaaggtgggagttggtagaggtgcggagtttgaattcggggattatggaaaaatgagataatgtacatgacaagcactatgttacagtgaagattggctcatttagtagaatcctgtagaagttatattcctctcatctcctatcatctcctattctacatcaacatcggaatatcgtatctatgctgacttcagcacttgatcttcaccccttgattactctctcacctttctcgtcacttcgctgtttctcggcggattctgaacatcctcggtttccccgcgcacccgggtttttcaaaaagccgaaaggttgttgactcgatttctgcctcttcaagcgaggagcgcgtcacgctgcatcccacgcgtgcgaccgggtttcttcaaacccagtatacatatctagtcgagttccagcgaacggtgcgcgaacagaatatgtttagatttcccgcattattactgggcccagatagacgagttgcatcaatttccgactgaactctatgagatgtgagcaagggctggttatgtattcctgctacaactatatggaggttcggagcttgatttagactattgcggagtctggagacataaacggtgcctcgtctatccatatgaatatctttggccttgagccaattaccaggtttgggaccgagtagaacgaacgttcactccactcattgctcctcgccacacatcatttggaaaggaatatcttcttttgtcttctgcattgccttgccctcctttactacacagagaagagcaggtaccaaacaagtattggagcatcatcatatgttcctatccattcagcattttattttattattagggaatcattctcgttgcagtcatgctttagtatatgtcaatggtcttttatcgggaatttgaattcttgaactgacgcgtgttctcgaagtttctagtattgatgtagtgcaagtgatcaatgcttgacattctgtacacagattttcgctagttaagggcgtacgttcttggctatctttcttcggtgatatggtactcaccagggcatgaaaagatccaagaaacagatccattgatcatatacgcaaaatatctcaggtcagtcctcgaccatgatcaatccatgtgtactgtgagtatgtctgacttcaatccaggatactgcgctattggtccctactcccatcgtgtatgaatgcttgcgagcatgcgaattttttggggcacagagcatccaagtattgtcctctatcgagctttcaagacaaaggacggccacctggtctgagcgctacaaacaaccaccattctcaaattctttgtgtgttgaagctatcagagctggcgactgacctacggtttgttgaccacagctctcgtgtccaaaatcaggttgaattaaaagagatatttgcaccaatcatctgtgcgaagccgcccgtcttcgatggtatgaaatgggattttcgacgaaggaaataggggtaatgcgagaacaggggcattacgcgacgatcatgagctttggaatgctctagttccagtttcctatgcagatcttctgctatggggaataagccgccgctttacatggaatatctcactgtggtatcaatactaacttggtggctcatggatgtctcaatataagatgctagttcgaaattgcacttttcgatcttttcaccttactctagcatcatcaaaatggatcattattcagattcatatatccatgtacaatcatactaagtgaccaaactatatatggcgtatattcaccctttccttattctctcaatcttcagcagggtaaaaaaatggcaaacataaaaacaaattgacatgcaccaatgatagattaaccgctcagcgtaacccaagctacagcattgagtggctggcgcaaacgatgcagcagcaaaattgagtgagtcaagccaaaggcactagtttggcagctaggagttggcgtagctgagtgttgaattacaatacttgtggctagctgggagagctgaagcaatttcatgaaccctagttcgtgccaattgccaagccagcatgcaggccaaatcaaaatcttgtctaacatttgattggtgatctccgagtcagatcatgtcaaaccgctctaggttgaggtcgcagctgcctatagctgtaagttgccattttgaagtagacgcccatagtagacggcattagcagattttggctgagaacgaatacctgcattgtttggtcgccaataatttcctcacgctgcacgggcggtcgtaaatggcgttgtctgtagagctgacggctacgctctgatgcgtggcttgcattaaaatgtgacaagacagcatatgttaaagttcattcaatgtcgatcattaattgctttgcaggagtctgagactgctgttcagcctgtcctaccttcacaagttgtggaagaaataatataaaagattcgcctcgacccggtgtccccaagtacattcttccataacttcgaatgcacctcttcgggcgattgagaaaaatatcttccaaacgaagtattgcttcaacaatttcgataattccaccagccgataagatggcatctgaatcatctgcgtacgagtactaccagatccaagcccggtttccggccaaagattccaatcctgatgatggcatcaaccgaaaggtctttgtccggcaggatatcgacgaatggagcggcaagaagtccaacaaaaagcaagtggatcttttcatcctggctctggacaatttccagaagctggaccccaaagaaagactgtcttactttcaggtcgccggtaggttctgcttgatcagcttctgttgatggtatttgacatgcatttgaccaggtattcatggacaaccgtttgtacgatgggatgatcctagcccagagcccatgcaaaatggctactgcttccactctcatgtgatatttcccatttggcaccggccatatgtgcttcttttcgaggtaggaggacctgatatctgggaggaattttgtactgatttcattctagcaagtcgtgtatgacatcatgatcaaggaagttatccctcaatttccggaagccgatcaagcttcatggcgtgaacaagccgagtcatggcgtcttcccttctgggactgggcacgaaatggccgtgtccctgacttggccaaataccctaccatcactgttcctaggcccgagggcggatcggatcgaatcaacaatcctctatttcagtttcgcatgcccacagacaagccgatgcgaagcgagggcgtcggtaccgaaaacacatgggaaaatgacaccgaacaggaagagtacaagaacgtatgtatgatctaggcaatgtgaagacaaaaccgagctaacttgatcagtttggcaatgcaattggaaccagccgttggccggatgaagatgaccagaatccaaccagtcagggctggcgtcatggtgttgtcaataaccgcaaagtggcagatgccttcaactctcacgatggatacaatgacaagaaccatggtcctgctgctgaaatggtgtataggctgcttactgtgcccatggactacactacgtttgcaagcacaaatccaacctcgaaagatcaaaacgtcgacgaggacttgaacatagaatatgtgagtatgttaatttgtcatgtcggagcacagtaactgactggaaattcacctggatagatccacaacaatgtgtaagtactcgaccagccggaaaatcgatgtctacatttactttgtgctattatcagtcgcttcagacactaacaacattgacttaaagccacggctgggcaggtgctggcggacatatgggaaatgtaccagttgcctcttttgacccgctgttcttcttgcatcactggtaagtatatgatcttcttcgaccacgtgggaatgcaactgtgattaacagttgcttgtagcaatattgatcgtctcttcgcaatttggcaagctctcaacccggacaagtggatggataacattcatggcgacaatgctaccatccgtgattcatttggcaaagagcatcctgtggacgaaaacactccccttcagccgtttagacgtgacgctgaaggaaattattggacccctgaaggaattagatttccttccaatctcggatattcctatccagagctgccacggtgggacagcaagtatcaccaggaggacggaacactcgaccaagccctgtttaaggaaaacatcatcaccattgttaaccgactgtatggtgtgtcgcgtgatttggcattggacccaaaagctccgaccccagagggcgttgaggcaattgacggtgggctcaaaattaccgacttcgccttcagtgttcgattcttgaagtacgttgtccctgagaaatatctgctgcaacaagaatttacatctaataattttgaatgacttagatacgcattgggagggcaacctttctgggtcaaattgtatctcgcccaagaggacggcatacaaaccccactgacagacttgatcgctgaggtgtacaacttcagccaaaagcccgagttggatggctcttcggtctgcggtaactgcaaaaaaggacaaaaatcgcgcgtcaagtcaactgcttacatcccaattaccccggttctctacaagcttctcaagggcggacggaaactgaagacgttgactcgcgacgaggtcttggcgtacataagaaagcgtgcatactggcgggtattcaaggtaagcatacctagtcactagctgccaccattgtatgaaacttgctgatctctcgtagaacgagaaagaattacctcgctacgaggttgagaaactggagttggaaatcattggcagcagcaacgacaccacgcacttcaccaaccccgctactccgccagcctttgagaatttcaagcaagagcctacaatcactggcggtgctgatggagcgctggatccagagctgaagcagacaaagactgacccaccggctccccggtaagttccgactcctataaatgagggatagatatggaaatatgatcgctaacttcagtcagaccaaaacgaccaagagcgaatctgccacttcacagcagtcttaaattccagcagactctcaaggcggacagtgtcattctcctcgagtcgtcgagcgtggatcttgtccaatccaatggcatcgacatgacacagatttcaatcctggatgcagagaatgatatcatcttccatctctccattcgccgagctcaggatgaaatcattttcaattccaaactcggtggatcatggggcgaggaggagcgggtcgatattgacgatcgattcgaaagtgaggatggtgcgacaattttgatccacgaccaaggtgaaggcttcgaagtctctatcaattgggtccatgcaatttggtttggcaaacgtgccaagggcaggacaccacagtcaattagttatgatcttggtgacaaggaggggacttccgctttgtccgagtatctcgaagtgcgcacctacccttcggtgaaagctttgttccttcaaaagcattctcatgaggaggagaagtagccacctgtggttgatatgtagtttgataggggtataggaaagatggcgatgttaatttgatcaaatttatgggaccgtggacatacatatcctcaagtcaggcctgaaccgacatgaatacaagtatatggcagcatcttgtattttgaaataagacgttgtattcttagacaagtaatgattctccgcaatcacaatctctggtcgagtcaaggccagtaatagatcccataatcaacattcttcttcagtttgtcattcacgcgcagatatccagacttttccagagtcccaagtttctgcgtaataagttcggccacaattcccccaaacaaaatgctccccggcacgttcaaatgggtataatccgctgggttgaggttgtatgtaaaagcattttctggcccgattgcattgagataccaggtgctagttttattcagatcaatataggcagcgtttgagcgatgagcggcaatgatggtggccaaggtctcattggcgagactcatgacgatacgcggtgtccctgttgatttatcgtagttgcgccgagatagaggagtgacgagaatcggtgtagccccagcattagaggcctcagtcacgaatctttcaagattcctggtgtattgtgataatgaaatgtttgctgcgggcttttggtcgtcgtggccgaattggattgtaacaagtggatgatagtcgtctcgaacttgtctcacggttgttagaacctcgtcccaataacctccgctccggaagctaacagtggttgcaccgttgtgaccgaaattgcgaccagatgctcctttgaaaagggttgtattgagaagtccatctccccatcctcctccgttcgaggattgagttgccgtggtgctatcacccaccaaaacaaaaaactggagtcttatgcgaggatgcaaatgcactggaaggatatgcctgaacgtaagataggatactgaggagggctactccggttgctttccagatcacgtccattattgtgtacatggatgcaacctttgtgagttattggggttagagtcattctccgcgaaagaagtgttttcatataaacttatagctctcacatgtgggttgatacactcattcctcccattggtgggaattcctcaatgcaggaaagtgatttgcttgggattcatgaatggagtgacgacattccaccaatcatcctaaatacggaatggcgcaggttgtgttctttgaagaattagtataatgccgtgagaatagaaaaggccaacgtatatccatcacatttcagaggagtatagggcatcacgccaggtagatcatgaggttgtttggttcccccactggcagagtccgagctggatccatcgagtacatgtgaaggttcaaagcatcgcagaattgttggattgtgtggtggatgagcccgagtcgtagggcggacttggaggaaacaaggtggaataattaaattcacatgtcttctgcattggtcagactttcatgagcatctccaggtctctgactgatgtccccaagggcccaagcccccacgagcagaggcaagagtcttcagtgatcttatatacagacagcccttgacggtggatcttacccagaagatcagttacattatatttttcggtcatcttaagttgttttgcaattgaacgtggtagacctaactgctactctaagcggccatatatttcctcggcctgttcttgagtgcatcgctcacaggcgcaagagaataggaagtcttctcgcagcagcttttgccgtgctttgaaatctacatatttgcatagatcaaaatagcaaataaagcactcgtcgcctgcggcaagatcttttgaggtagtcaataccatccgcccattgttgtctgctctccagatgacctaggatatttgagtatgtttgaaatctagtattctcgaggggtaacttacatttggaatgcaggaatggttgactatagaggctcttgggtagatacccaagccataatccacgcctcgttcgattggggggtccggaatgggaaatatcccagtgtcacttggatatagcccgaacgaattagactcttctttgcagatgagatccactagatcatcaacgctaaggtctgactgattatcgtgagttagatatacctcaactagcctcttccagtgcaaaatctgcgtctgaggccacctctcccggttactgtggaggatctcaatggaatcccacccccgcttgaaccgatcttcccaggaatagagctcagatggcttgaaccctgcctgtaactcaatgtaccttccagctagaagacgcatgactgtccaaagcatggcaaatgcatactggccctcgttttgacgaagactttctccgtagtttttcaaccaagcgcattcaaagtcatgccgagcctggtctgccgtccgacaacgattgtcacaccaaacaacatcccggatgcaattcctttggcaaatctctctatgtgtgtcccgtgacacttgttggcggcatttcaggttactgcaaatcgaggcatcaggatgggatggatccgcagacgggatcaaagcatatggtgtatctgccagaatcatggtaccggctgacacaaatgccgagacttgtagcaatcttcctttgtgaggattgtagctttgtgtcaggtttggatgcacgtagatatccgcgtcttgctccagagcatcgacagctgggggcttggcagctgtggacttgactggcttctgtgcaacgatcaactgcctgcgttccatcatacccatgtccacagggccgtctcgcttggtcgctgtgatctgcatcccatcttctgcttgaaggaataggccagatctttggagaaggttgtccatttcctccagatcgtaaagtctgacggaatagaaaagatcttggcggatcgaaggaccttccaaatcaatcacaatctctcggctagcgaggagggttttgtcgggagacagctctcgttcccggcaggccagaagtttttctttgccctcaagccattcccatccactttgactgaagttggatcaaatccatgctccatccacgtggtcaatgacgaaaattcctcctggtttcaggacccgagaggcctcccggagggactgtaggtctccttcatcattacagtgtccaaaagaatttcccagaagtatgaccagatcaaaggaacaatccgatgcaggaatccgacgaaggtctcccttctgaaacgtgacgttactctgcacgttttcttctattgcgcgttttcgagcaaggtcaaggagatatgtgctctgatcgatgccgtaaaaattcaccgatggaaagcgtttggcaagattgatgctatgtcggccttggccacagcatagatccaataccttgatcgaagattcttgggttttcaacagctgttgcacgctagatattccgatgatgtcgttgcattcggcttctgtgattgcggggacttcgacacagtcaccatcggtgtagaggtacatctcattgtaggccttcttccaccaatctttctcggtatgaggaaacaatgaggcaacacggccaagactaggaattgtcattctaaagaatcttgggcagtgaaaacaatcagagacaagactgttcacacggtgactatttatacccatttgtctgtccatgtggatatcagttttctgcagggaaaatattccctgcgcacgggtcttcttgatcttgcgatcttcatggcgctaatgatcgtgcatcatgcatgccacgtcatagaggggtcgaatacgagctatacaacatacaaagggcagcatagcaaaaagattcagctaagctagcgaagtggacacaaatacatctaacgaatgaagccccgagatggcaaacaccaacaagaatactccgggacgaatcatgacgctcactttgggctcgttcggtgtagttgacgagatcccacccctcgtttttgtctgccatttcacaccactttgatattcacacgtttgaaagatgggggctttaatagacagacactggcgcgtgcttatggcagtctgcacattaatgtgggggatttactttagtacctctatcgacttttcaccctgggagcacagctgattcgtccagtttatgatcttcccgcccccctgtcggtttcattacaggaacatttgttactttcaagctctcagtatacgtatttcgtctctgcgctttatacagcctacgcggcacccaacacgatcctgccctttttctcggggttcgctgtacagcgggtagggaaaagaacggttctcttggctaccctcacgagcgtaatagttggccagttgatcttcgctgtcgccactcagttgcgactccagtctgggatgatgattgggcgcgtgcttattggcttaggcggagagataattggcgtcctaggaagtgaaatcacaacgcgctggttcaagtgagctccgattctatcaaactcggggtgctgctaacatctgttgctcagggacaaggaactatctttggcgctgtcaatggttctgtgcatatcgagactaggctccgtcggagcctccgttttcgtccccaggatggtcgaaagctttggcgtggtatgcgttgtatggatcgggtcgatagtgccattgggagtcgctgttactggtgctttttatctactagccgttgacactacaacttcgcaccatgagagtgagaacattgattcgataaaatcgcttcgtcggtttcccgctatcttctggcagttggccttaatttgcatactgggctacggaggtatcaatactttcactatctctgcgcagcggttcctagccgcatggttctacgatggagatcaacgcaaggctggatttgccacagggtaagtcaatttaccatcacgctgtccaaagctgacattgatcctatctagtataccatacttcctctctgggattctgactcccgtatttggactgttgttgaatttgccatggtttcgaagctacccgggggcccttggtgccactaatatcctcatgatggcagcgcatcttctattgctttatagaataggaccgattggaccgatgtgtatgttggggatagcgtttgcatcttatggtgtggtattttgggccgggctcgcgcgatgtctcctctccatcgtcgagtcctgctcgtcaaagacaaatatgccagaggccgggtgcagagcttcagatgaactcgaatatgggaccattcaactcccgacacaactctctgatgatcgctctgatgctgacggagataacttgccgggggagacgggtgaaggcatcatcacacttggctatggaattatgaccagtctcaatagcctgagtacggctgtggttccgatcctcctcgccaagatagagaatgccgtgggctttacaggcttgcaggttttctttctcatactatcattactcgggcttttcgcatctgttgggttgtcatggtcttggaggatctagaaggaatatatgtcatctcgactgctatgtgagattccgttatctctttgcgttgcactactacttcaaatctagtcgcttcatgtcataaacgcactgtcaacgaccaagatactatggcctacaatgttgtatctgcatgggcttatgtagcctttaaaatcctcgcattaagtcatatgtcaccaccaccaaccaactttgtgtcaaaactagactagagagaatgtctccgaaatcaggcacttcacaggcataggctcaggcatttacacattatggtgttgattattgaacaggtggatatatcggcaccaaggcaagtctttttgaactttgtaaacaatattgatatggtgcctggggtgatcggtgggcttaaatacccagaataaccttgtgatcggcggccttctcctcgggctcgccgaagatatcaacgttccaacgaggcttgttggcaacataaggggtgttgtagcgcttccggttctggcccaaagcgctgaccttctggacctcctcgggggtgagttctatctccttgaagttgtcacggatgcgcgaaggcgtgaccgacttagggatgacactgtgtccaccgacttgagaccaggcgagactagaatactgttagctttcatggaatggtaccacagaggggttggtaagatcttacatgacgtgggcggggctgacttcctggccagtgcgctttgcaacggactcggcaacttccttgacttcggggcgggtgatgagcaggggaatatcgaactggttgttaccaaatgcctagaggctggatcagcattgggtttctcggcaatcaaccaaaagatagatacgtacagagtaagcagtgacatggattcccttctgttggcagtattcgatcaggtcattgctctgaagcacggggtggcgctcgatctggttggtggcagggacgacgccggtggctttgatgagagcctcgatctgcgagggtattagtttgtgtatggcgagtttgggaacaaggaggatacgaacatgctcaatcttgtggttggagacaccgacggagcgagccttgctcttggggagctgggtcatggctaagaggagttagtcgggtctgagttttgttcgcacaatatatccacgtacccttccaggtgtccacaatagagacaccatcgtcaatgatcacatcaccaccctcgacggtgctgttggcaacgagcgggaagtatgaatcgcccttctgaaaggcaacgggccagtgaacaaggtaaagctttgtctgtcagccatgtctcacggtttcactaaatgggatcatcatacgtcaagataatccaactcaagctcggcaaggcaagcatccaaagaggcctcgacaacctccgggcggtgctggctacatgtagagtcaataaattggtagtctaacaatggagttcgagatatcgtacgtgttccatagcttggaggtctgcaacgtgacacgtcagtttgtgaaatcatgtaacatcccaagttggtatagttcgacttacgatgaagatatcctcccgcttcagaccgggaacatctttataagcacgcttgatgccctcggcgacctcacgctggttctggtagctgtaaacaggcggtagcttgtaagtatggtgcaattgtaataggtaatatttcatgccggagggattggtgctgcatacatcgttgccaaatcctgagagaagtgcgggttagccaacagtccgaagcaatgatagatgaacatgtacacaccaggtggcggtagccagccttcagggcctcataaacagcctcgccgaccaggccaggagcagactgccaagtaccaaatcctagctggctggacgtggagtcagtgaagtttctcagtattttctaccgaatatacgcacgggatctggtggccggtgttgagagtgactttcttgccgagagacatgatgtttaaagcggtttaagaatagtttggaagaggaagaggaagaggaagagaagaagatcccccagtctttaacttgttcagttctccggcggggcttctggactgtcctatccccgcccatctcggaggagactccaccgaggtaaatgatggatgttcgaagctgaatatagagtatgatagaaaattcatttacgtctatgtttgcatattcagcttattgaaatgtctactgttgtagcgaatatagagtgcgaatatagaggatatccttgtaacctactatatacttagtacaccctacatagacggtatatctaagagagaccgcggggtaagttatgatgtcattctgcgaattccgggattgaactcttgtggctctcatgttctttcatgtcgtccattttccattatgatttcttttacatcagcagtttggtcaccgtgtggtgttggctatgctctcggatcgtccaattgagcccgcaatattacgctgcggcgtcacccggccgagaatggtacaatatggcagtgctatgtcaccatcgtttcagtttcgaaagcatcgaatcgcatcgaatccccttcattatccttgaacgtgtccacagaagccaagttgccctatattaaaaataccctactccgggcccatgaataccctcaaaagttcgggataattgggcgcacccaatccactcactggatcccaaccctcggtcgcagagaacccctcggtgttgcaacccgggttggtgcccttggtcacgtcaaagaacgcctccgggtgggcgtacaatacaggattgacaaagccaacagtggacttgcccgcggccagtcgctcctcgttgatgcgcgtgaggattccagcaaacaccggtgcagaggccgacgttccaccaatcgacacggcaattcccctgtaatagatgatgaccttgtcaccaatagcagcaacgtctggataggcacgtccgatccggttgtagataccgttattctcaccgaagctgctgttgtccacgctctcatagtatgggtatgagggcttggccttgtcaaagtaatcggcaacagcctgggcctgatagtcaggcgccttgtaaatgttgctgaaaccgccgccggacgggtacctagacacagcctgctccttgtgatctcctggcgcagaacccgtggggatttcagtgcctcccaccgcagtaaggtatggacaggaggcaggaaaatccggagtaaagattctgccatcggggccgaggcagttgctgggggtagggtcgcctccgcgtccagccacaccagaatcacccgaagcgaccaccactgaaactcccattgtacccagcttcatgaactcggcacattgtcgccgctgataggaaatcgggaggtctgcttcggcggagccataggaaatcgagatgaccttgggcgggtcgtacaccccacattgcagggagcccttgtagcctccgtctgccgggtcgggatatggagggtccaaaggcgagatggtactgcagtacgagccgtcgatggcgtccaagaacgtgttgaggaagccattgaaggtataatgattctcgtaatgcatatcatcgctttggaaaagcacggagttctgcggccaaataatcgggtaggagatttggaagtccaggttggattcagccccagcattgaaactgtccgtaggagcctggccaccatcaaccgacttgagagttgggtgtgtgccatgggggattttcctgctaaaaagtcagaaatccaatcaactaggaatttcaattcaacgcgacatacgagtacaagttcgagaagaacaaatctaaatcttcctgggcgtagacatccccggtaccctcaaagactcccaattcattcccctttgtagcagagtggccttcgctaatgttatacatctctgtaggcttgtcaacacatccagcttgtaggtattcgtactcagatcacttacgttgaatgcattggggtgtaacgactcgggagcaaaaggatgaagcctcactcagcagctcctcaattggtatgaggatcggctcaataatagggggagccccatccacgacgcgtttctgcttctcagtcgatctccgtacaccagtcacctcccgcatagaaatccctggagtgacatagtcgacgtgctcacgcacggagctcgggagatgatatctatagtcaggggtcagcgagactatagatccaatccaaatgatcaatcttactcgcgacaggccacatgcgaccggcccgtttcagcatgtgagtagatatagtactctgtgtccagcaaattctccagttccttggcatcggcatcaaactgaatccattgcttgttggctgattgcgtgatgcggtcttttgcaataccagttgattccaaccaagaacgcacgtcattcacgctctgttcagtcggggcaaagaggtcgtgcacttccctgatggacagatgctgtccatagcgactcgagtatgggttggacctagacagatgtcaattttgcacggtggtagattcattgcgcaagtccacacaagtccataagtagctcatggccatagtcaaggttagactgggtcaacccgattcgcacaggtagtgacacatttccttcgagcttcttgccttcaacccaagattttggaatgaaatcacgacgctcgtgcaattgataattatgagcccttggtactgccatcacactggccgacagggcacaaagcacaatgaaagatctcatcgtaatagtcttagaaggagttagctaattcagcttgctccttcgaacttacggatcatgtgggaaagacccgcgtcggacaatgcatcctttatagcattcaggtcgttcatttggactaaacccacccaagaggaaggacagccagttgaccaacgatgctaagaccccggcaaccaaacagggcaaggatagagcttatcctgtttgccattagcctgtaatgatctcgctaagggttgaacatgccattcataacgtgaccataccaaatcaacacccctcggaaagttaaggcgggtcacacggggtccatatgaagggttgcgttcttcggcaagttctcaaaaaccgcgtcgttacaacccatcaagtggacgagattcaagacacttagaaacatgtatcttcgtcttcggtcgtagaggttccattgggttcaaacctccgaacatgatcctagcaattaccgatatgagaacaatgacctcacgcgaaattaacggatcaccggtgttgtacctcgggaaaaaaactacccctgagagattgactcgcaaccagtacatgatcaaacgcacaaggcttggaccattagacgtcgaatgtcgaatcataaccaaaagatttccggttctttggtgccgaaatgaggtcgttgctactgtacattcggaaatgttgggaaaaacttgaatcggttcgggaccaagatcaggcttgaatccactgttgatgttaaagcatcatcttgcaattcggtgggattatcgggggatacttgcccaggtggtcaaatggtaaaagtccagtcttatgcactccacacactgtgcatcaatttacgatttaaaggattggcggctattccaacgccatggacactacgggggaccatgcgagtcttgcatcgcaaatatcatccatacactacacggctgcctaaactccgcagatagggatgatctcatgagtggtattgaagagttgatacagaagaccacccaaggctgcataattgcaacgtcggtggcagaaacacggttgcatgtgccttttccaggcagaagtcatgcgagcaaaggatggaagcccttggggtatctcatgtgcagagaactttatgtcggcggatggcattgccgtcgatgttcgggtgcaggttattagcggagaactggagatcaaaatttgaatgaactcccagaaatcccagaactaaagacataggcagactgttgcctggaaggttcaggtgaaaatggcggcacttctgccacatcggtaaggggatgtggttgaaaattctcaaactgacggttcgaccgcaaggtctctcgtccatgacactgacacgggtatatttcaactgccgtgccttgagcgcatcaaaaggcggcctcaaactgacgtgatattcgagggcacaattcccttctcaatttgaaataaccaaccattcaggatccacaccatttccataataaatccaccagctgctgccgatgcaagggcttggcgatgtaatcgtccatccccttcgccaaatacgtctctgcgtctcccttgagagcattgcccgtcaacgcaaggatgggcatatcgagtttcatccgtcgaatgtgctctgtggcggttaatccatccatgaccggcatgctgatgtccatcaggatgacattataggccaaaggcttctgcttcaccatacgcactgcttccgctccatcccaggcagcatcgacgcgcttgaaacccaggctgctgagaagttttaacataataagttgattgaccttgttgtcttcgacaaggaggatgtgtttgtgtggggcgatcttctcgagcgaggcggaattatccaatgcctcaggtatagccggttgcaatctctgcttcactgtagacactggcgaggtaaggcgagccattttggctgtcatccagaacacactaccgcgtccgtcgggattggcatggaaaccaaccgctccacccatcaattcagccaggctcttgcatatcgacaggccaaggcccgtaccctggtacctttttgtggccgtgtccgcgaatcgcgtgaagggggtgaagagggtgtttgaggcatcttcgggtacgccgataccagtgtccactacctgcgtggagattacatacatatcggggtccttttcatcgatggtataggtggcatgaactcgaacatgaccactctcggtgaatttcactgcgttggtgaccatattttgcagaacttggcggaatcgcagcgggtcacctttgaggtttggaggaaagcccgcgcttacatcgcccatgattttgacaccgggcttcagcgccgactgacaattccgaacgacagccgagatcacgtcggggatgtggacaacgtctgtgttcaaggggaaggttcccgacgatagcttggaataatctaggacatcgttaatgacctgcagcaagatagatgttgagtcttccaggatggatccgaattcccgctggtcatcagtcaattcggtcctcattagcattgtcaaagccaagagcatgccattcatcggggtgcgcaattcgtgggacatgttggccaagaaatcggacttgagcttggccgattcttcaaaggcgtcaatcaaacgcgcctctgtcgcccggcgttcagtcatgtcgcgggtaactttcacgaatcccacatggctgccgttctgatagatggcagtgatcatgacattggcccaaaaccggttgccatccttgtgataacgccagccctcatcctccagttttccttcttgtaaacagacctccagctcgcggacgggtttttttatttcgcggtcatcgcgaccgtaaaagatggagaaatgctggccgatgatctcggaggatgtgtatcccttcagaatagcggcgcccgaattccatgtcgcaatatggccgcgcgtatcgagcatgaaaatggcataatccctcacggtgtcgaccaagattttgtaaatttcgttgggataggcatcgtcgctgatggaattcgaccgatgccggtgatgtttgatccgctgggcttccagtagcatgtagatcagcgagtcatcttcaaagatgggtgtcacgctaagtgagaagaaagcgtcgacttttgccacgtgaacacgctggatgacctgcacttcgcgagttgatatggcagtgccaagagccccgatcagggaggcgatatcgggggctgggaggatggaggggggaagatcgtagacattcgctgccaacagttggtctcgtgagtgcttgaagacttccacatgactgttggacacttcgacgattcgcagagcgccgtctaaaacgagagtcggtttcctacaggggttaacgggaataatccatgctatccctccaaggggttcgggttctcacggtgtaaatcgatagatgcgactcaacgatccgacaacgggctgttcaagggatttgttctccagattcaagtcactctcggccggaggcgtgatcaccatcgcgacattgttcataggacagtcgattctcaggtggagcatctgatccacaggcatattgctaacagcctgggaggaagtgaggatgtcattcaagaagattttcagaagcaataaagggataaggatcaggatgatcagtccaaaggggaaaggctgaagaaagtcaagagggaaagttggggtggacgggagaaatgcccgggactggactttttccagtgcaatccaggccaaaggtggataaaagaagaaaaaacaaggtcaacaatgtccaaatgagcgaaactgatgttccaagaaaggcaattcgatctgctttgtagaactgaacttgtagaacttcatggatatcccctaaggtatatgaagtgatgtacgtcattcgctgtttcaccacatcgaggggcaatggaacggaaataactcggtatattgtgaatggatgaggctcgaagtatctgatatatgaacgatatgcttctacaagatcacagtctcatgctccgtccgctctaccatcttcaccaacgcatcggcaatcccatatgaaaacgcatacccacctcctccaaacccatacgcggagagcaccacccgactaccctttcgctccgaatccaaacggaaccctccttttcgggatggtcggatcccaataatgtagctcaccgtatctgcagctgggtgttcggggacaatttcaggcgctaaccgatgcgcgcgtgcaatctcatccctcgcgatatccatatcgacttcaggtgacctagggaggttagagtggatcgttttggagatgtggggatgtccatacagattgtcctgttgcttcaccccacccaggaccacccccttggatagaggccgaggaatcacataggtatattccttgccatttcggaagtgaagtgtgttgcattgatcagtggtcagaaacacattctgccctcgctccggaaaacagttatcatcttgcacatccgtcaaggttttactgccccagccgcttgcattgatgaatatccctgattcggggaacatgtcatacagttcctgaagagactcgacacgttggcggataaagcgacccccaagagactcaacctgttctctgagataaggcatatgtctcgtaggatctgtaacaagcgtctcataggcccaggcacagttgaaattgggcgggtattcaccaggactcatctcgcggaactaaaccggacagaggatgttaatatcagtcaagcgggaagcacatggagtacgcattaccttggatactactgtcttaccccatattgccgagtcaggagaaggtttttcttcgaggtattctcgtgcgttgacaatgctcacccctgcctcggggccatcttgtgccatcttgagtagtacgcgatgtgtgacagcttgaagataccgttgatccggagtaatacccccagcggcatgccacgctgctcctgcccaagccgaagcatagtagatattctggtctcccggtagatattcggccaccaataccacggggaaaccattcagcagcaattgccgagcagttgcacaaccaatgatccctgcaccgaggattataatgggtctttgagaaaagggcacctcgttggtatgaaattggtcgtattcacccatcgtgaggcgggtataaggttcaagtgacgaatgatatcagaggggctcggaggatgggaaaggggtcaggtcaacaacgttcagggtctcaaacttgggatccttcaacgcggcattgcttctgtttagaattaatcattcaattaattcaatcattcaatagcagaatgattttccacccagtccaagctatatctcactccggcaataattaagtgggtctataacggcctcttccgacgtcgcatgcccgtcagtccctttttttcccttcctatctccattcgtccccgttctacccaatcccattgaagagaacgaaatccaagatagaagtgatgtgctagatcccccgatgtcccttcttcattggctattttgttagctcgcccgtggacatacctgtacggagtactccgtatctggagacacttcatgcagccatcggtacctacggagtcgtcggtctgacattcggcttaagccgacttaaacactgtactgggtttagctgtggttccctcctttctcagcataggggaaggctcctgcagaggaccgggttcaggatggagagggcccagaagagccaggtgagtgtccacttctaagctgatccagatatatcatatcccccatatatattgttattaactgtttcacatctcagaaatccccttcagagcaagatagaattgacgttcttcacgatcgggatgccgaaaagatcttaccctatgaagccgatgattcgccttttcccgaggtgcgggctgtcatccagccagtcaatgacttgacgctgcctgttaacacggtccgcatgtggactattggtattttgtttactatcgtgagtcttgttttctatgcgaccggacaattggcaagataactaacgtcgacacaggtcggtagtggactgaaccagttcttcagcttacgacagcccagtgtgaatatcagtgctctagtagcacagttactcgctttccctctgggatgcgcctgggcgaaatggattccccttggggtcttgaatcccgaccggcatttcaatatcaaggagcatgccttgatcacaatcatggcaaacgtctctattggctctgctgctgccacccaaattatcgaagcgcttgtcaagttctataatatgccgtcacagggtgggtttgaagtcttgttgtgcattaccacgcaattgtttggcttcggcttagccggcatggcgtcgcgctggctagttggcccagcatcgatgatttggccgcaggtgttgtcaaatgccgcacttttgaccactctccattctcgctctgataccatcgcagatggctggcagatcacacgtcttcgcttctttctttatgtgttcgtcggtggtgccatctggtacttcgtcccgggatatctctttacgggtctcagcacattcgccttcatttgctggattgtgccattcaatgtggtggtgaatcagctctttgggcaaaccaccggactagggatgtcggtattgacctttgactgggcccaggtggtctatgccaaccaaagccccctgcttgttcccttctgggctggccttaatgtgatgggatcatttgcactcttcttttggcttgtgtgccccctcgtttactacaccaacacctggtattccgcacacttgccactgctcaattccaacaccttcgataatactggaactccttataacaccagtcgtatcatgggttcgagcgggaggatcgaccaaactgcgtatcggaactattcgcccatgtttttaccggctggctatgcaatcacatttggggttgcctttgctaacttgacgggcatcttcttccacatcgcgttgtatcatgggaaagacttgtggcaacaatggaagggcactagcaaacaagacgtccatattcgactgatgtcttcatatcgagccgtaccctggtggtggtttgctgcagtaactgtcctgatgtttgtcttgagtatcgtgaccaacgaggtgtggcatacgggtctaccggcatggggtgtgcttgtggcattcgtgttaccagtggtctactttatccctgtgggagtcatcaaagcgctcacaaatatcagtagtaaccaactgaacctgctcacggaattcattggcgggtatgcattcctcgggcagcccgtggccaacatggctttcaaattctatggttatgtcgccgtccagcaaggactcgagtgggttacatacctccaaaacggaattggcattgattaacatcatattagatttgtcgccgatatgaagttggctcattatatgcacatcgccccacgccttctgtttgtagcccaaggccttgccacactcatcggagctatcgttcaatgtggtgtgacagtgttcatgatcacaagaattgatggtgtatgcacccctgaagcccagggaaatttcatctgccctcatggaaaggtcacatattcttcgtctcttatttggggtgagttccatcttattgtcgatgttctaccatgtcatacctaatcaaccttcaggtgctgttggtccaggtcggttgttttcttccgggcagatatatagcaatctgctttggtttttcctggtcgggcctgcggtggtagtcatcacctatcttctaggtcgtcgttggaaagctgccaaccatgtctcctggcccgtcgcttttggtgcaatgagtctagtcccacctgccacaggtatcagcttctcctcgtggtggatagtcaacttgatattcaatggcgtactccgtcaccgcaaacccgcgtggtggtcgaaatacagtatgttcatggtttccctttcatcgttgattcttttgctaatcgtccgcagattatgtactatccgccgcgctagactgcggcgttgcagtcgctacagtaatcattttcttttgcataactctcccagctggttcgttgaactggtggggaaatgctgtgtcgaaaaccacagccgacggcaaaggcacgccctacatgggcttacccgcgcatggctactttggccccccaaaaggaacttgggagtgatcaggaatgtctgctcggcctcattttagtgtgtttctaccatatattgccgtaattaccgtttgttgggtggactttgagtatcgcgtcagtccagcagatccggatgatcccacagatatcaccctcgccgccctcgcaacttgaacaatttgggacggtcggatcgatgcttcctttccatcatcgatagtcaaaatcagtttatcatttccgaaaccgcgacgtcggtctcggtgctaagtaagacaagtatctcccgatatggacattggatctgtggggtgccctcataccatgaagttctcacctcaaaggattcttcgaaacatcgagaccgataacatgactataatgaccacgatcgataccgctatgtcattcgcgattcacctgtttccttcgtgaatcgtctcccggaaaggggtcattccgatcgaattgtcaacgcgaggagcagctgagacaggcttgtgtcccaaccccgtaattattgttttcacatgagtgaaatttggctccagggctagctgtatcatgaggaatttattgtcatgcccatttcggcctttccgaacgcgtttattgctttccattcccagcaaagcccgacaaactcagcattaccaaaatcaaattcgcggctttctctgcacggctgctcttatgtctcactctcccaaagatgactcctcgcaacacctttatgagcccatcgaaggagtggaaaaactggaaagctatcgcgtggggggctatcactccatgacaatcggtgatcatattcacaatcgctatcaggtggttcataaactcggtcatggcacgtactcgacgatctggctggcctgagatcaaaaagatggcaaatacgtcgccatcaaagtgtgtaccgcggattcgaacccgcttgaattcagcgtcctttcggaactttccaactcgcaacaaagttcaactgctagcttgaagacaatgataccttcagtattaaatagattcgagattaaaggaccgaatggtacgcacgcctgttatgtgacagtcccggcaagaatgagtctctccgaggcaaaagatgcctcatagaaccgccttttccaattggaggctgctcgggccttagcagcacagctattccttgcagttgagtacgtccactcccaggagtttgttcacggagatcttcattttcctccggttgccatttgacctaggccaactttctgtggagggtttgtacaaaaggtacgggaaccggaattcgaagcagtaagacccttcgatagtcaaccgcttccaccgaatatgccatcacgggccgttttaccaatctggctgggcgaggcaagcgataaacttaaactcccagaagccaaaatcctactcggcgctctcggtgaagccttctctcctaccaagcaacagaggtttgagtcgcacaccccgcttataggccgaccacgagaggctcggttcgaaccacacaagcctctgtccttcccatcagacatttggtcactcggatgctctttatggaacatcataggtcaaagctcactttttgacggcatgtttgcaaccgaagatagcatcactggtgggcaagtcgatgcactaggtatgctacccccggaatggtagtacaaatgggaggggcgacatatcagattcaccaaaaatggaaagccgatcaatcgggacccttaccggtcgtggggggacagatttgaacaagatatgcaggaacctcgacggaggaaagggatgctatttttaagatgctgaagtcgatgcttcaattcaggcctgagaatcgctcacctgcaaagcaaattcccgaatgtgaatggatggtcaattgggctttacctgagtacgcgaagattcgaatgatatgagtactgtaagctctctggattctctgtcaatatctaggtatacaggagtcgaaaatggtcttttggatacccttgcagattgggctacgggggggttagcgtttatcttcacatcgtagctcatgaatatatcatttctcatttctcatttctcataattcaagacaggccatcaaactttcactgaacgtccgctcacatagactttcacaatattccggtcatccccagtcatcagaaacttctcaaatattacctggatagtatcttcatcttcaactgggctcatcactcctggttggccaagatccgtggtatgaacttcgagcgcatcaaactctttgccaactgcaaagttaccgacacggtcatcgagaccacacacttgcgctccacctagagtggcaagaaagaaggcctcgggcaacgaaagtgcaggatctcgtccttgggtcaacttctgctgcgcattcgacacaatgaaggcctgtttcatggcatccaatatagacgacgagtagccaccaccactatcagtgcccaggcccaccttgataccgcgacgcaaatactctcgcacaggtgcgaccataaaatcttccatggtggtattggcgattgggcagtgggcaactccacagccaagttcttggatgcgacacatctctccttcttgtagaaagatacagtgggcaagaatcgatcgattattcaacagaccatatcgctgatagagatcagcttccgtatcaaactctggaaagagctgatgcgtgaactcgatttcctgcttggcttcattgaaatgcgtttgtattggaagatcgggatgttcacgggcgatggcaccgaccccatccagtaattccggctcacaggatatcgcaaagcgtggcgtcagtattggtttcaccaggcggtattccggatcaagtttctgaatatgacgaatgagttcacgtgtttcttgcaatgagtcggacaccgacggatcccgataccagtccggggcattccggttcatattgcacttccccaccagagcgcgctgtcctttgtcaaagcagacatccgccaagattcgagttgcctgcccatgatgtgagccgtaatatgaggcggtggtaattccctgctgcaagaagcccgtcacgcaagaggagtacatgcgtttggcatattccggatcttggaacttggcctcgtgggcaaaagtgaccttattcaaccagtcgagtaaggaaatccctcttccgacgccacgctgtgcccactggggtgcatggttgtgagtatcaacgaagccgggacacagaaattccccgcgcctgagatacttcactgggaaaacgtcggggacatggccattttctgaaagaatagagttgatctgatccaattccacatttccttgtaacgcctgaatcttgccatctgttcccacaatcataatgcaattctccaggatctcgaagtcatccagacttcgggaatggattaccgtgccgtggaaggcgaggggcagcccagagaccggcgtggcgttcttgtcgagctcttccataatacacaataagatgatataataatcaccagggattatttgcgaatgatgggtgtagttctgtgaaatgtaggagggggatagatgaagataacaggtttggaggtgaggggcattaataatcggcatatgctgagatgaggtgaaacagcctgcaattgtgaagctccttggcagaaatccatgagcctgctattcttcaatctaaagagtctattcctttcaattaagtgggagtcttgagtttgtatcaatccatcttcatctctgtctaggtcatcacgaactatataaaacattaagtcgcaggtactaaaacgattcttaatctgatgaatctggtatgcttttagttgcgacaaactaatattgattaacatgaaaggaaaaagcctggcccgatggaaaactccgtctacgtccggtagagcacggtttgaatatagagaaagagattcgttcaaagggtatagtatgatgccatctcctcctgaaaccaattgtaggagtagaaaagttgttccgccatctgtggatcgatcatcggcacagtcccactcccatccacgagcaacacgtcatcaagaactggagcgagtgggactgggggtggagggggtgcggctaaagacatcggatgagctgggagcagtgcaaatggtggaggcggtggttgcggttgcggttggtaatggtgttgatgttgtgggtgatggtgatgttgctgctgttctagttgctgttgctgataggccatttggctgaagatcactgtgctctggtgccggaatgtctctgccaaccggtccaccccaggccgacgcttgccaaattcttccaacagtacgacaacggcctgaatgccacgtcgcatcgtctgctcttcgggatgccagggggcaggctgagagtcgcgtaatgagcgggcattctgctcaaggcaccacaggatagtgataccagcaaaataaacttgactcaatgttaaccatatccattttagcttgccgactgaatagctgtcccaataggatcgaatgacttggatactagattcaccacagctgatgatactggttatgtcgggcgtcggattgcgggggctggggcggtacatcaagagaagcgttgtgtaatagagataatcgtaataagaggtagaatagagaagtgccgatgggtatactggagctgttatgcgccagtcatcaacctcatggcggaatcgactaagtgtggcggcagcttcttggggacacagtcgtggcaggctgctatatactacagaggaaacaattagaggaaaggaaaaaccagacgaaattctcaagacttcacttacagtattgatagatgcgtgaaaatatccgccgcagacgtgtcacctgcaagggaatcgtcatcgcgctcgcgccaggggcttcggtttcatcgtcattgagttctcgcagaagacccacgctaatatcgtcgtccgcaattcccaatggccgacccaaggtgctagcgataaggcgatcgagattgtaaagactccaaaacgcgcgctttgccatctcctcctccgcaatgctagaataggaccgtgttttgtgcaaacccatactaattgacagcctcatcgtcgcacccagcaaatgccaaatgctgggaccagcagtcgcaaacatagtatacaaggacaatcccagcagtgcccgcacagccggtaagtcttcattttgcaatgccagtggcaacgtctcctggctggcatggtaaaattcagctgcctggatcggatccgcagacccgatcaggagggaaatggcaatgacgatgtgataagaatgatgcgtttctggagatggaacaccaccggtatagatatggcgcagattggccataaactccggacgagacaaaaacgggtactggtatcccatactatcgaaatattgtccagccagccgttccgcttcctccagcgacgacaagcgcataactcgcggggcggaggaaggtcgtgcgaccgacggtcggcggtgctccaactgatcgcgaaagatctcgccgatgttggggagttcggtgcctactccagtcgaggcctccgagggtcctgcagtcaccgacgaaccaccactgccggcagggcttggcattgaggtggcacgattacccccggtcgcaatcatggcgggcacctgataccaccaatccggatctccctcgccatcgactggtgttcccgtcggcaattccgctaccgagaggcccgacttacggcggacgacatcctccaaccatcgtactcgtttttgtaaattctccagctgatctcgggggacggaggcgctagcgacctgaggaccgggtgggggtatggtgcaccggactccggcgcgggtgcaagcggaacaattggggtaacgaaagtcgcatttcttcttccttttgcgacaaaagtcacaggccgtcgatactcgtttgctgcgagcatgactcgaaacatctatagactcatgatgaaccggcggtggttgagaccaggttggagtgtaagtattaatcgaatccaagcggaattttcccagctgatcgcggaaatccttgtttccagacgtgctcatggtcaggggccacttaagctatccatttcccaaacatatcgaccaattgtcattgaaggaaacgcacgttcatcgaaagtgtactttagtgctgttgaagaagggaagatatgaaaagtgggggggccccgggttactttcgcttacataggcgaaacgctgatctgtccatggccgaaagagttatcattctgcgagattgtgactttgggatgattctattaatctatatggggcacggggtactacctaagtatctctgcgtttatatttatcgagaatggctgggactatctcaatatccctgtttcgtcaggcttatcttcaggaattagggttactttgcatttcccggtctctgaagacattgctgcagagctggactatgaggtcgaggatcatattgaaaatgtttactgatcaagctccaggctcttcaatctgatatatccctatccttcttaccggatccactgagccgtgccaactcccgggtgctatatacgagccgttgaaacagtaaaacaacatgcaggaactgatctacatagtacatacctgaagtgggatgagagcaacattgaatggaccctcatgtttccactatacaacgttactacagcactgcatgatatccccgtgttatttgatggtccccgatgatgcaactacatggagcttctttgcctggaaaacacataaataagccctcagttcccctcccaaaatcttgattaccgatctcaactcactcaatacacttcttcattcactgtccgagcctcactctcgctttcaagatgaagtttaccgccatccctctcctgttcgcaaccgctgccagcgccaccgtccagggcttcgacatctccagctaccaacccagcgtggacttcgctggtgcttacaagtctggcgctcgctttgtcatgatcaaggtaggctttcccgaattcacaaccgttcccttctcagtcccaatactaactatatcaggcaactgagggtaccagctatacctccagcactttctccagccaatatactggtgccactaacgccggtctgatccgtggtggttatcactttgcccagcccgccagtagcaccggtgccactcaagccaagtacttcatcgcccacggtggaggttggtccaatgacggcctgaccctgcccggtatgctagacattgaatacaacccatccggcgcaacctgctatgggctcagccaatctgccatggttgcttgggtcaaggactttggcgagacctacaaggctgccgagggccggtaccctatgatctactccaccgccgactggtggaacacttgcactggtggcagcacggcattcagcgcggactacccgttggttctggcttcatacagcacctcggtcggcactatccccggtggctggccttaccagagcttctggcagaacaccgattcgtatagctatggaggtgattccgaggtttggaatggcagcgaagccgctctgcagacctttgccaagaacgcttcttaaatggagccaattggaccgagaatttcccacaagatgtatacttgtatgtatctattggtttttgattcgttttcagatacttgtgcagatcacccgttcttgcctctttgattgaacggcagtggaattgatcgtttttataccttcccagacgggctagcagctcggaaatgtccgtagatttcctagatcgctaatccttgtaaagaaaaatgaagggaccattagacaataaacccgggagctgatgtagaatgtgtgtcttcttattggctaagccttcttcttaattaggtctaatttcaacaagtctccctcggctttttacgagtcgccccgagttggaatccgataccggacctattctaggcttcgacagttttgacttacagtaattgagggcaggttcatgccactaccaaataagcatcataggtaaaaatgtggacagttaactaaatatctagctactatgtcgttgtgactcattcttattcatcatgacggatccactccggcgctcggaaaggcaatgcaactatacggggtaggcatcgtatacttaaatcgttacttgtctagacaatttgcttctaatgcgcaccaaagttccaagcataatgtcatatctcattttaaacacagatggctttcttacgaaagatctttctgtcgtatatcttctgttgacagccctcttgagcttccttgttgtcctcgcatggcgtcggacggaaaaaccgacaatactgattgtcaactcatactctggtgatataattttaaaagaggcacagtcgacattcatgtcagatgccaggagtttgatcaaagaaggaatccagaaggtaagttgaagcttccatgacaaaaatgacatgacactgcatctaatgtacacgcttcagttcaacggaccatttcgcatcataaccactcttggctctcggttaattctcccagcatcatatatagagtggctgaaaaattttccggatttagatcatcaagcgcttgtccacgatgttgcagctccctttactaacgcagggtgggaactgacgacacacgatttcatatagcaatatttcgcggcataccccgggatggaaggacagagattggtcactgatcccagaaggattctgatcaatgtcacaaaaacgaaattgaacaatcagagcagtcgtgggtgacagcctcagggcccatgatgcacgttgggctctgactaacatgacctttcatcacagagtgtgggctgcttcatgaacatcttacggaggctcttgacaagacctggatggatcacgatggtacttttgctctatattttgctggaacgtttgattaacttattcttcagactggcacaccactgattggtctcaacatgcagtcggcttcattgggcaaatgtcagcatctgtttttgtcggtcctgaattagctcgtgatcctaagtggcaagacttaattatcacttcgacatgaatacctttatggggattcgatctctccgcgcctggccggcgtttcttcgtccatttgttcattggtttttgccagaactccgaaagtgccgccagcaaatgcgtcttgctcgtcttatgctacagccaatcttggatcgcagggcgcatgagcaatctcgctctattgagcctggtgagatagaaaaattcgaggataccatacagtggcttgaataaatcgctgccggacgcccctatgatgccgctgcggcacaaattgcgttcgcgataagcgcaatgcacacaacttctgagctactcaagcaggccttactggatattcgtatgcacccagatctgattccggctctgcgagatgaagcacagaaggctgtcgaggagagcggatggacaactgcaggcgtcttcaaaatgcagctgttggacagcgcagtaaaggagacacagcggctcaaaccgggatcattaggtatgtgtctaacccatcagtactctcatatcaaggtactgaactcactctctcacagtaaatcttgagtggaaagcgctgcaagatgtgatccttcccaatggcttgactatccctcgcgggaccaatgttgcagttgattcatccatgatgtgggacccagcgatttaccccgatcaattctcttatgatgcgtaccgttttcttcgtcttcgcaactccggtgatactgcagcagcacttgcttccatcagcccggagcacattgcctttggaattggcaaggcaatctgtcctgggagattctttgctagcaacgaagtcaagattgctctgctaagattctcttgacttatgatgttagaattgctgaggggatgatacccaagattgtggcgataggatttgaaatgctaagtgatccaaaagcaaagctagaggttaaaaagcgaagggtttgatagaaaataagatttgaattggtactatagaagactataagactgtaaataaatttccaactgagaggggaaaccctgtaataatacagtatattaccactaggccatggagggggctgatatctgttctgtttgttgtctgacagtctcccttcactcactcatatatcttctgcgggactaccatggatctcatcgaatatgccaccgaggccgatgggccaggacttgccaaagtcaacgtccaaagctttcaaggccgccgtctcctcgaagaaattttcccagaggccagcttgaccagggtgcaggaattcaaaataattatgggaatgaaacatcttgccaatcccaatatgcacgtcctcaagatccatgatccagtcagtggggagctggcgacctacagccgttggcagtttccagcatcatttggtccaagcctggttaccataagtgagaaggcagccttgttggccaaggaccccgttccacatgcaccaagaccaatgaatgaggaggttttcaatgctttcaaaaggctcctagaggatggtcgcaagcgatacaccacagataacgacatcagtaagtgacccccacattcgcgataggggtttttgctcaaatggttcatcagtcctcgatctgctagcaaccctaccggaatatcaacgacgagggtttggttctgctatcttgaaatggggcatagaaaaggcagatgcatcccagttgcgtatcttcctcgagggtacgcctgaaggtgttcctatctacctcaagtatgggtggaagatattagaggaggtggttatggattatacaccatttggaagtgttgggcaagagacctttttcctaatgatgagggatccaattttacaataagagtgcagggttcctataaagttgctcaatctactttggagattaatgtcgacataaggtacatttaccaaactgaggataggcttgaagtacatactactccaataccttcagacatgtaaatgtacatcgtactgagtggataaacgaactgccgggcacgtcatttccccagggaatttcctacacttccccggacatactctctcttccctctttcgctcccatattcatcttttacaatggctcatttcaagtttgcaatccttgacgattaccagggcattgcgcctgcctatttcactcacctcgagtcgcgagttgacatttccagttttcccgaaaccctcgatccccgcgatcctgcacaacacgatgcccttgtccaacgactccttcccttcgatatcatcttggcgatgcgcgagcgaacaccttttgcagccaatactattgcagcgctcccaaatttgaaacttcttttgaccacgggtactcgcaatctggcgctagatctcggggcatttacacgttccaatgtggctgtcgcaggcaccgagggtcgcccacccggtgtgaattcgacggttcagcatacatgggctttgatcttgggactagcccgaaatatagcacgcgacgatgcagccgtcaaacgcggtgcatggcaaggttcccttgggatcaacttgtccgggaagacattagggctgcttgggctgggaaaacttgggtcgcaagtaggaaagattggcgctctggctttcggcatgaaggttctcgcatggtcaacaaacctgacacaggaaaaggccgacgagcaagcgcacgctcagggtctgccagtggggacatttgccgtcgccgcgtccaaagaggaattcttcgcccaggctgacatcgtcagtgtacacagcgtactatcggatcgaagtcgtggaattgttggcgcaactgaaatagcaaatatgcaaccatctgcatttatcatcaatacttcacgtgggcccttgattgaggagcaggccctcctcgaggctctgaatgcgggccgcattcgtggcgccgcgttagatgtctttgacccggagccattgcctctggatagtccatggcgtaatactccctggggccaggatggacgcagtgaagttctgctttccccccacatgggatacggagaggaggagctattgcgggggtggtatcgcgaaacagcggagaatttagagcggtggttgaatggacaggagctactgcgcaagatgaattgatgaccatagctatatcaatacaaacaaccgaggttgttccgagaatgtcatgttctacatgtggaggttcaccgaatgacgaatacgtacgatccggctaacagttcgccttcacaagtgtaaacggtcaaaggtcttcgttaggactcttttggcaagacaattaattgcgttgtgcctcggtcttccgagcggaatgacctcggttgaagggaacgatgtggaatgttctcttcatcgctactccgtacgtcttcgacttaataaaaccccccgcgatttccactttttaattccaaacatcttcttttctcctatcctcttctgttctcctctattaccccctcttcccttctcatctccatacctccctcaccatggccccatccgccgatcccattcccgcgacgcccgccattgccaacttccctcctccgacccatcccgaatgtctgcgcgttgagcgcagtacgaaggcatttgctagcggagcttattctctcgtggacctccccgcaggtgccgtcttcgccaagatcactacggccactcccggaaagaaagcctacacgagcgtgcaaaccggccgcgacacccacatcgaactcaactccgacctagtctactgcaaccactcatgcgcaccatcgttggtcttcgatatgggtcgcatggaggtgcgggtcgtggacgaccatcctttgaagaaaggtgatgccctcaccttcttctaccccagcaccgagtgggatatggaccagccattccagtgcacctgcggggcaggtgacgggatctgcagaggttggatctccggagccaagaccatgcccgccgaccagttgaacggatactggcttaatggccacatttccgaattgttgaatgagaccaaggccaattgaggggctggcaccccaaattggaggcttatagaactatcgaacaagacacaagatatccaaatatccgatagaaaaatagagattagcgttaagactaaaaaaaaataccacacagacgctctatactttcataacactcccgcgatcattgcaaattgaatcatcctacgtcggtcaacctctttcttcaacatcatcaaacaagtcgccacaataaccgcttcctccagttcaagagactgtgacgcagcctcgtcgatctgcaattcacccccattgcccgccgaagatcgcgacgttccgggcgtccgagcatcgtctccgcgggccagctgtgcaatcctgtggcgctgggtctctttactcttggccttgtcttcccccacggcacgaagaacaatcaaattgactttctgcccatccgcccttctctccttggcatatttccattcaaactgtttacctccaggtatagcaaagcgcattgagcgagaggtccatttccccgcgacagccacttcctcggggctgtcaccagaaggttgaagcaggtgcacaacgggatcccggctcggaccgaacgagtactcagttcggatcagatctccgcgttcggggtgggacagggtcgcattacctgagcaacgtttgtcgcgcgtggagacgtaagcctcggcgccgtctgggttgtagacaaagatctcagtctggcgggatggcagtgggagacggaaagcgcgaatgccttgggcattaatggttagaatgcgcgatgggtagaaagaggatggactctcgataagtgttcttgtcgtgctgttagacctgacagacaaggccgaggagtgaatctccatttccttctgaggatcgagcatggctgtagtgttcattgtccacgtctggatgaccaccgtgtctccatgtatggccgtgtatatatgttcttcccccgatacgacactttcctatttgggctttgggcgacccatggttttcccaaacttaactccatttcttggcgctcgtgctccatgacgtcggagatcaccacttccttccttctctcattcgctacttctctcgctgaccatgtctggacttgctgagcctcactcgtatagcctcttttgtagttcctacgagtcccaaggcgaaagatacgatctcatgaccttggctcgaacgagaaccttctattctggtggatgggcagcgatgataatgtctgtcgcctcccaatacgaactgccgtcacccggtagatattctgggccgacttacttcgcaattgcgatcagcaagtccgccaagctcctttctacctttctacaacttcagaagagaacagtgaatttgatctccgatctcttgacgcccccttcctaatggggtatttcggacgaggatccactcccaacagtcctagcactcgattggtgtccacacattacgcctattattggtttccgcttgtcagtcgctaaccggcggtctcttccatccaactgggcttgtggtttagtggtataatactcccttagcatgggagtggtccggggttcgattccccgcgagtccatatttttgcttttgctatgttcattttgttcagctcatgaccattcggctattttggcatatctatatacatctttcatctttctattatttttatcttccggctggcaacaatgccgctgtatctacattccaatcacactcgggcccaaacctcttgagccgtcagcagtgtactcaaaaccatggtcgatccaaccaccacgtccccggtgggcatccagcccaaaagctccaacgggatgagcaaatcacagccatctaccacgatctgcttgacccgggcagaggtaacagttgattttaccggggtcttctcggaagcgatcttccggttctttctcttgccattcttcttagaaggctgctccgcgggactgacaagcagtgcccaaatggcttctgcaacagagaaagagagcgcatataaccaaaacgtattggcttggttcatgacaggatcattccaggtcactgcgtagacgcccattgcatgaagctagccttcgtcagtcctattcacggaggaagaaggaacagcagtaaataacataccgtggtcaggtcttccaggacaaagtataggccaaagcaagtgcatttggctagttcaagcagtccagccacagaaccgaagccatccttgcccagcaacgccaacatccgctggaaggagtcaatgaacccaaagaagcggaaatatctccgcgctacgcaacaaacccagtatcagtatatataacagtatatatctatcaatccaatatagaattcaacttactcagtgccaattgcagcttgaccgtggtcaattgcacggccaggacattgctcacggtgagtgctgcgaccacctgcgacacgcattggatcagacgaagggtcttttcaagaccagcgcccgatttgacaaagcgagaaaagtgttggatcatcgttgtcgcactgccacggactctggggacagtatactcttgtgggataggggtggaaattatgtgtcaaggcttggaagtgggctaatttcacttgcactagtaaagttgcttattcagcctttgcatgttcgaagattagtatgggttaactttacgtgtagtcggctattgattgttgtatcgaatagttcatatgggtattctgagcatgatcgaagttagctggtggttgtggttgcatgctggagatatatatagagcgacaagtccagcactacaaaaaatttacaaaaaatttacttgaaattgaaacaattgacaagcaaataagacaatgctcgcaaaatagtacgttgatatcagtcctcagccattcactcgagcaggttcatcaaaccacccactcgacaatagttccaagtctgctctaccgtcctttgccgcccgagatatcctgacccagacgatatccaccaaccttctcccactccactttctgtcgtgtaatgggaagctgcctccggagacccttgaatacgccctcggatgtctgaacaaacgcccgattcagcgcttcctggtaatcgcgctcggccgcagcaatccgtgaaacaatcgactcggcggacacggaagggatgggaatgctgataggcttagtagtattgagggccacattgccatcttcgtagtagtgcacgtcaacgtggatgttgccagtcagggtagaggacgaggaggagacggggagttggtaaattgcgcggaaacgaccattcctattgtcctagaacagacaatcctccccagaaggggaagcgtccataacgattagcttcccaagatattaattgtagagatgtaaccacccaccagaagttgttgggggagtatcggttggcgaccaagacgatggcgacggcagagtcattctcaatagggtagacaccatacgagcagttggggtagtgttcgcgggcatgaacaccgaacgacttgagtagcgatttgctaaacacggtaagcggagtaccaccaagacttcagccgggatcattccttacatcaagtcggcgtgctctgactccaatgcgtatgattgtgctgccgaggctgtctattgccatggtgcaaacccgtaagccttcaatgtatcagcccagttggtcaggcgaaacctacctgtgtggtgtggtcgatctcaaacgaggtttggctctcagggtcgaagtagcggttgtcttcgagctcgttaaattcactaacaatgaccttcccagcaaacttattagctccaccgcagacatagttgactcccaagcgacacccacctcctgacttgatcctggcaatttcaccgttgcgagctgcgcctcgttgtaccgtttgaatgcgggtagaagagaaggaatgatatcctcgccctcggaagttaaggcttgcacatctaatcaagtagtagggattagcaccgtccatgtagatgccgggattgcggggatcgggataggcagcgtagggctaagagggcgatttaccggcgacaacatctgcgagctgaagaaaacatgtcagtgatcattcccaagcttcaggcagacgttgaccaggggagtgggggatcctggatcattgttgtgcatacctctcctggcggggcaccctcgatgaaggaggatgccaattcaacagtggaagccatggcgtaggaaaatacgatcggagtatttgatgttgagcagagcaagaggttcaagagcaatccaagtcctcgagtaattctagagctgggaaatggtgattgtctagagtctctgcggagagaaagacagctgtcggaggcggagagcgataagcacgtggcctactatacatccaagactatgtgcgtatggacatcaacattctgtaacgtgaagtgattcgtaaaataatgtgccaggtatctgaaaactcgctggaataacgaatgtgtatcttgcttcaaaatatccatatccaaataacaccatgctcttaaaacctttccagaaaaaaaaacaaaattctcgagcgctaacgaataatatcaaattccgcatcgctgtaataagagctgttttcaatcaatgctcatattcataaagccatcgctggcttcggtcatcccttgcaggccgacgcgtttcgcacctccagcatgagcaatcggtcgattgcccacatcagaactgagtcgttcagagaacggtggcccgaggcccggctttggcggcggaccccagatgtttgggcccgtgtcactgatattatgggagtgggtcatcaccggactactctgagcactcacgctgggtgaaacagcccggcgcttgaaaagattaggatcgaagtcatcgtcacgacgccgcttgcgacatatctctccaatacttggcatacccggagcatggggcgtggaagagcgggaacgctgcttgaaagattccgcggtgacagagcccatggtcgtagacggagtcatatccataaacatatcttcatctgccacagacgagggacctccctgacgaaccgggggtggggttcggtatcgtccatcaaacgagttccaaaactcgaggccacccgagttgcgactggcttgcttgccaaaagtatccgtagatcctgtgtccattcccactctgaccgccggatcttctgttgccgtcgaatccaatgaggtcgagggccgcaatgatgggaattcgccgagtgcaggggtgggctcaggttcggtgtcgcggacttgccggaccacttctgcttctcgtttcatatcgctatcaactggagcaccctcctccatcagagcagcacgaatgcgcgcaaaggtcttggttttgggctgttactgtagttagcttctagaccactgaattaaaggcacccacttacaagtaagctcccacgtcgggtcaccgcacgacggattacccccagtggacctccaccttccggacgtggagtgggaattgggcttccgcttcgcgtcgtgcgactctcactatcgtcgctcatatcggacaaacgtaggtcgcgtgtgccaaagctgagactctctctgcgtgaatgcgcagtctgccgtggagcaaaataaccactagagtgctcgacactcttcatgatgggcggagagtgaggggtaggactaggtttcgtactgtttccactcgcactgctagagctgtggcgactacggcctttgcgaaagcgcgcgcgttggaaactcatcaagctggcggcagcttgtgagtaccctcccatccagtcgttgccagggctctgcatattgctggcaaacggactcggcgcacttatgcgagtcgcctgcggcgtattgatcataacatcgtcgcgatcagccatggactcatcctcttcctcgctactacttgtgtccgactctatcatattcacactcgacatggagcttgagattgttgcacggtccgccggacctgatgttgaaaaaggcggaccggatgtcgctccaagcgatccgcgtcgctggggtattgccatgccccgccctccaacggtgggagatgaatctggggacgactcggctagggtggaatggtggagattcgtacatgcgcgtgagaagtcgaggccccgagatcgtcgagggagaacagatcccggagatccgtagatatgtgatgggtcaagtttaggagagagaggggcgcagttcgtaagtgatgacacggcgggtttggaaggcaagtttagcgagaggtttgaataagatgcatttgatcttcgaggtgttgcggggagaacgggtatcgcattgtcgtctttgcttgatgcccgactgagatcaccagtggatggttgagtggaggatgtaggtctggaagcatcggataatgaacgcgacttgggagaacgcgacggttcaagttggtgttctagatcagtttcatggggttgagataattgttgactgagcttgctttcaaacccgtgggctgatgtactgcgccctggcgctggaggtcgcacctgcgccatattcaagtcactttggtctgatatggcgataaagagcaagggtgcacgttgaagggcatcatttgtcggcaccgaggcagggaaatccggtcaattccacaagtaatgcccggagagcacatgcgctgtggttaatgacagaatatccacagtattcggatcgaggcgaggtctacattgcattgcaagtcgctggctctgagcggttaacgagatcagatgacgtgcgctaacccgatccggccaagtcgcttctgttacggagtagtgacctacattatacaatcgtatacttcctatgtgctacacaactgaacagagaaatatgaaatcgatagttcaatgctttcgaatgaacgaacagacattccacatgctcattctttctcatgccctcacgccagactcatggcattgctgattggcaccacatgccattcccaatcattgcattgattttgcagaacgctccccttgatcaaatccgaatcgcgtgtctgccatagcttagtgatcactgcccgtgttctagcaatgttcgagatcgttgaatcggccattgttgccagggaacgtagcacaatcgctcgtcccgactttgattccatttccgattccgggaagagctcatcgtcagatggatcaagctccacggctgccacaaagactggccatgtcacattgactagcgatttacggccaaggaggtccgatatgagtcgcagaatctggcgcacataagtcttcaccaaaggtgtggcgggaccagccccgtacagagagcaatgtaagtaaagcattgcagccagccgcttagcatctgcaaccagtccaagaatttcgtcagccttccccatctcttggactaagttctctagttggcgttcaagggaggctgcacgtagtgagaacgacgccttgtccgcatcagacgtatgttgtctccttgttcgactcatatctgtgattttggcgaggattgacaccaattcagggctgcatcccatccaaagatcgatgttgtgttcgtccggtttccagtagtcggtaccaaacaagacctctttggcacaggcggttcggcccatgacatcctggaaggcaaaaaattgctctgcaaagctcgtcacaggatccgatggggctgttgactgcaataatgtcatttgctgttttcttcgcaattggattaagtcgttggcgcctttgagatggatgatccattgttgatcacacttgtcgactatctcgtaaagacatagcatgatcatgataaccagtacttcggggtccatggagcatgtcaagcttccctctgacgagagacgttgacgaaggtccctcagagtctctgatttataacgcaggccgattgcactatagcttggattgagccttgaccagtggcatgcgcccaatgcttggatggccttgaaaagcgtaggagaagccgataaacacaatggcagaatcacagagacaaacggcgaagataatgtggagctggcggttgtgcgagggcacacttgttgaagatagtaatcaaacagctctccgtgcccagatttggatagctctggaaatagcgcaagagacggagggaggctggtgttgaaattcatgctaaccccgctgagatgtgagaagttttgtaaccaggaccatatttggtggtttctggaagatggtgagtttgagcattgggtaactgaaatcaatgcattccactcgtcgaagtcaacgttcacttcgtctgggtgtgcaaaagttgacacaccgctgtttatgaagccccaagggctaatggttggcactgggcaccactcgtgcgtttccgaaagcgagccgtatgtaggttgatttgcgccggttttgttccaaacacctgcacgcccaaaagccactccccgactgatgaattccgattcccatttcaaaactagattcttcgtacatggaaatcctttctcctggcagcgtgtgcaaaggggctttttggtgtcacatcggacacgactcgcccgacactctttgcaaccatcgcgagatcgggtcttcaccggacctgtgcggtctgcagcttttcttcgtggcatacgagttccgtatatataaacttcacatggtatgaaccagcctgggccaaaaatagtatgtgaggtgggtagttggagttggtaaagaaaattgggggtggcggataagcgttggccgccccgccgaatctccaactgattttcgactgtcactcctatatccgtatactatgatgatgatgtgtataggttacatggaaatagtttgaacattatccctaagcgtgattctttttccactctgccgcacactcgccaaatgtcacaaattcaacctcccgctgtttgagccacgaaatcattcgatcaatcatcccaaccacatgagccattccactagtatctgggtgcagcaccaaaggaaaaacaaagccttgctcggaatcttcctcgattgatttttcgagagcctcactgtaaaggaactcaaaccgcgacttccaattttgctcaatggtgatcggactaacgaacccgtgcgagttttcggccgctggaagaaactgcattggagtcatgtcctccatataccaattgcacggaatttcaaccaaactccgcggagttctggctgcaggagcggggaggggcttcatccaagtagaagcagacttggaaggcgagaagtcaatggccttgggctctgacattcgagggacaaagtacaacgccgaatcatgatgcgtgagggatgaatctgtctgaattcagtttcctgatagtcacatataatatgagcaaagtcgtataccgtataaaaatccaaactcttctagaacttgaatggtgtgtgttcgcaactgatataatggtgctctccatcctcgaggttgctttccagtcaagtcggttgccagctgcacacatttggcgatgacctctctctcctgtgactcagtcatttgactggagccctcgtgcgcatatccatggcaaccgatttcagcgcccgattgaacaattgctttggtctctgctgggaatgattccattgaatgaccggggacaaaccaagtcaccgaggaactaattccatgtttcttaaagagacgcaataagcgtggcactccgacttgagctgcgaaaaagccactgctataatcggccagattggttgtagccgaagcaccagtccctaggaagcccgagacggcatcgaaatccacggagagtagaatttggacttttggtttcctggaagtcattggaagtgaatttgtaattttctaagtagtgcaaaggtccaggtccaggctaaggggttatcaaatgacaagcagacgaagttcaagccccgaaccccagaaggaaagacgacccgacacgtggatccaccccgccatagagtgcaacccttgagaactccaacctttgccttatcaattcactttcggagaacaacatgctgttaacgccgattcaacaagtctactcttgttatcctcttgacttgacacagcaacatctaaactcgggtttcccgtaaagaagttgaccggtttgagaccaaccgtcatcttttcagagggcatcactggccaatcctcgattctcggattgtgcgtggatccaaatgtgtgccaaataacaatgtcttcatttcgcactgttgacttggagtccgggtcctttctccgctgagaaatggctgagtcgattccttcgccgccaagggattgcatagtatgttttccggccgggaaaagctcgtcatcgttataacgggtgatccagattgcatggtttccatattcagatcgctttgcatggaaagactctggatgggccagtagcagttggctatagcatggaacaattttgaatccaatcggcgtaccggtgataggattgactttcgcctcattgatgatcttgaacgtgcgattcttgttaaaatcaagatctagccctccctcctctgtcacaatccttgaatgtgttgtgtacccgaccccgaacggatttcggacagatgggtcgttaaagggcaaagggttggactcttcaacctgcaacgagtttgcaactccatcaatcgcaggatcgatacggagagagaacaagtgttggtgatatggcgcaaggacacccggagcaacaatggtgccatatccaacttcgtcaccgatgttgatgggactggtagacaagatcccagtggcccggacttcataatgaatcgaagcatcttggccaaagtggaaagcaaagatatactcataattgctgaccgtgatgatggtctgcagcactaggatacgtgatctgaccaccgcggcatttcccgtacggaagtttgtgtgcttccataaaatcccatcgtcttgctcatgacagcagatgacattgggcaatttcaagggttcccccgaggaagtgttgtgccatccgtcaaaatacttgatcagtcccaggcaatcacatccaagcgataagttgtttgcgttgatcccagccccgtcgttcccaaggtcaaatgcagctttgcgtggatacggagcacgaggatccccgtatggcacaaacatctctgccaatgacagccggtagaagagactccgaccgtcatagcggatgtcatgcaacgtgagaccctcacggtaattgaagcccacgcgcatagtccatttctcccaggtcaataggtttccgtgtgacttgaaggaaaccccttctggctggacaacctggtagggcttggtggttgtgcgcggtggtggtcgcagactgggatggtattcactcatatcagtgggatggatcttgcaggggtcgtacagccgtgcttcttcatgaacactctcgctcgcagacgaaggtaaatggtagaccttggtcaccctgagctgctcagagacctccgcacacaagtcaagtggatatgcgtaatagttggcgtcgggattgtccactagtcgcatataaaaccaacactattcatctatgttagctgggattgagatattgcgaatcttatcagacatgtactgaccatgctagtccgttccgacatgtcgttcatgccatcagtggcataagcccacggttcgacaacgaccgaagcccctcgaggtaacctcaactttccaatttcattttgtaccctctcgtctgccatacaagcattctcaacatctttcatataagccgagtcaatgaaggagtgttttcccacaagggtctcttgttgaatgacaacactccggtccagatcaactacaagctcggtgagttcatttggccccgagtcgccacgaacgaccacttggatgtgagcgatacgaccaggtcgggagacttgaggctggtgaagatgttctctctctaagaatactatcatctcctgcttcggtggctctttcaaggtgatgaagcgaaagttgaagcttttttcatgaagtagctcttggacaacttttgcggcctacaatatggttgatacgacattcaacttttgtttaattaaaacgacttgacttaccttggtaatttcctggggcacaagaggatcaaaagggtgcgtatcagacataatggaagtatctaagaggtgaacgaggataataaagacagcgtgataaacctgggcttttataagttgaactgcaagatatatcagccaaccagtcacagacaagaccagataacgcaatgcatgatattcgctaagatataagaataaccggaaagatcggctggtcaatcgctaaggtaaagaatagccggaatatcttcacctccaaaggttagaacggaaatagacctctatgtatcataggaaggtaagcactagagcccatagtatattataatcacacgaatcaaaactcacttgaagccccaaatatatcagtgagatgtttggggattttcctgttcggcttatctcctcttttccccgcctcaactcttttcttcctctcgccaacctgtatattcaaaacatggcttcaactcgcaccattctggtcttccagcatgatgccagtctccatattcttgaaacaaccgtgacggccattttccctttcaaggacctcgaagaatccgatcgtctactcttcaaagacgccagcgaggaacaccatgtcattgtcaccgagaagactattttccacccccaaggcggcggtcagccctccgacacgggcgtattaaaaggcccatctggcactttcacagtcacggctgttcgcacggatgccaagggacaggtgcttcacctcggtctcttcgaggactcgtcatccgctttcaacaaaggcgagaccgttgagcaggcaattgatgtggaaaaacgtcaactatattcccgtttgcatactgcaggccacgtcctaggcgcatcagtccgacatcttttggagaaagagattgagaactttgatgaactgaaagcctcacatttccccgactctgcagcatgcgagtttcaaggctcaattgaagggaaatggaaggaccctatccagaacaagctggatgaatatatcgccgccaagatgcctgtccaaatcgaatggtgggatgaagaggatttccggtcgcgtggactggagcgattgattcctgaccgcagcttggtgcctgcaggtgaaaagtctcgtgtggtcaacatcgtcggtgctgaagtgtacccttgcggaggcacgcatgtcgatacgacagatttgtgtggacctgtgacggtcaagaagatttcgagaaagcaagggaactcacgagttagctatgtggtgaaatgatgttgtttcactggttcggcttttgggaataccatatagacaaggagtgagcgacccaatagaccaaaataatagatgttttgactagacctcatctcgaatcactttccacctcggcgatatgttacggaaaagttctacattacatgtgagagcaatgggaggcctatgttgttacctttcagatgtctaaataagggcccaacagcaaatgtccctgatggtgcgagtgaatactccagggtagaaaaatcatattatgcctaaaagtcagcgctagattcatcgagatggctctatctcctggagctgatagccttcctccgagggatcagcgcgtgaaataaagggccgcgcaagagcctcctcatcatcgaatttagcaaagccatcgggtccagcaatatcagctttgtcataaggaacgtcacacatgaccgaccgcagcggtggatagtagcgacggtatgaaaaccaggctatcagcatgcccaagagtcctccacacgtcacatcatatacatcatgccgataatcggccagacgggacagggcgaccatcaaagcacacaacaaggggaaaaacccaagtaaacagcgtccaagatccgttcgaggacggaaaacatgcatttgaccacacaagaagctataaagtgacgattgttagatggagtgtcccagcgctgcgcatcagaatcacttacagatataaatagcccagcccgccaaaagagaagctgctatgcccactagggaagctcctccatccctcttgtagaatgtgctggttcgattctgtgcagacagtccatgcgaccagcgcattgttcgatgtacctcgggagggtttgcagcgcgataacaagtccggacgtggtctccccgctgcattttttattatgtccgtcaggaacgaggtcaacatcaaagccacgaatagtccgagtactgtcacttgcgtcttatgcacaccggcgcgaaatgttgcggaccaggcgagaatcaccaaaaaaggaatcagaccagcgaagatgaccgaccacacttttactccggttagaaacaagtgaagcagactgcatcattggcaattgacttacaaacaggaactcgttcgtggacagcgaacgggtactgaatggctttgttatccagcgaaaacatgcgatggaacgggttcacgaataattgaatctattcatgtattaaaaatgtgcagatccatgatttagatcgtttgcgacttaccagtacccatcctgctactagaaaccccaatgcgatatagtcggcggcataggtgcgttgcgcaaagcgagctgcagcaccagcgagtccaacacgttgtagaatcggggtcgacccgttccccgaaccattgtgaggcatcctgcacaactgccgaggacgccagagagatcttcagatcttgactgggcgcatgtcgagattggaaaaaggtcaagttgacattcgacacattgcggaagcacagaccacgtcaccgctccgtcttccaaacaactcggagaaacttcaactctgctcacttggctcaatttctttctcctttctcacatctcctaccctcgtgctagtcggtatggccgatgagagccaacaacgagctgtgaccacggcatttgcgcccccgccgcccttatggaaacacttcacgcgtgagaatatcgacaagctggaacagatcaaagctgaagcttccaagggcgaggatggacggttgaacaagcacaagcagtggtccgcagctgaattgcgcgctctggagctcccctcagagctccggtacctagtgccgcccgacatccccgaaggacaatacagcgtctttggcgagttgcaaaccgttcgttcccctacatctgagctctgcgccggacaatactgactctgaaatagctgtctacaacattgccgtcattacaagagcaaggcatcgaacaactctacccagaaccccccgcagccggtaccgaccagaactcgcagccatcaccccctctcaatcacgcatactaccttctcaagatcagcaagtccctgctccttaatttcctagagttcaccggtatcctatcggtttcgccggaacaattcgaatccaaggtcgaagacctgcgcaacttattcatcaatgcacaccaccttctcaacctctaccgtccacaccaagcgcgcgaatcactcatcatgatgatggaagagcagctcaaccacagccgagaggaaatgaagcaaatggacaaggtcaaagcggaggttgagagtgtactagagcagctgcaagcggagggcagccgcatggctactactgggtcaggagacgataccgaccaggccaaagcgctgaaagaaaaggccgatgagcactctcggctgatctgggctctactcgacaaagaaaactgaatccagcaacgggctggtttctctgaatctgaacagtattgccttctccgagtcgaacgactgaaccattcctgcgttacgtgtttaaatgtgacattgtttcgaaggtcagcttcgttgaaaagcctaccacggaggaatctcgaatcgagtattcatcagcatccaacaaatcgtccctcgggttctctatccaggtctcatgggcacgcaatgctcactgggctgtcaaatatgatgtgtcgatggaaggatcgcgcgcttcgtatcatccaaggcagatattgaaccacgccaatatcttggggacattccgatgttctagcaacctgctatcaagggcgcctcgttttagaatactgaactatctaagaccggcactctcgaagtcccattaaaccactcgagaggccaacaacatgccggttttcgtgaatgtctgccggagcttcttgcttacaactacaggcagtatcatatatcgcatatcattatattgtacactggtctgaccctttctaccgaatgcaatgcaaatgactgctcttccttctacattattattttgtcaattctaagtaccgtagccaataaactcctcacgctaaagtagccaatgagtgaaataacaataacaaaatgcaaatcaatgagaagcggcgcgttgctccgcccaggccttgtcaatggcacattcggccagtcgcttcaactccacaatgaaatcggcgaccaatttgaaatggccaagttcagttgcaggtagtttccgcgagaaaatacgctcaatcatgaccgtggcgacattcaatcggcccaggtcttcacgcgaatgtggatccaatgggttctgaagaatactgcagaagatggtgagcaatgcggacatggggtagaagatcagagtcctaggaggataagcttgggttccagtacatagcatgacgaaaatcacataccagaaaaccccatcgactaccacatgttctgccgcctcgaggtaacatagacttgatcgactggcttctaccgaaagcgccatacttgaactcaccccatccatcataccgctttgtccttgcatccacgctttacatcttccactcgcttgatggatgatggtcatgcataggtgatagttcagacgcagcatgacggtgtgcatacgcatgttcggatccgaggtctcggaagaaaatgacatggttggacgccatctaggagggactgatagccgccattcttctagcgcgtcatcgagttctcggattgacttgagcagctcggcgtctgatttttggagacagctgactgaatatagctctcgatgggcccgggctttgatgatgctcaggcgcaagtcgaatggaaatactggaccgtaccatgggacttcttcgttttccacgtccaagaatgctcgatcgagatatcccggaggtagtgtcagatcacaattttcgtcagtgatggtaggcggctgacccgtgcgcagtgcaagatccttatcaatcgtgtagcaaatccagaagatattccgtagttgtgaatgctcttgctggctgcgctcatccgtcgagatggcctgaccgtcaagccggttgccacccagcatgaaaatgagtcgcgcagcaagcgccgcataatagttggtggtccgcatatttcccgaagataattcgaagagagtctatgttcatcggttagttatcgaaattatacactagagtagctcatttaccaatatggtaacagcctgcgctgcgtccagactggcagactcctgtaatacttgcggcataaagaactttgccttggtagcaagtagatcatgatcgattgcagccgtcgcagtagtcgtgttgacaatgtgcttgacgtcagggagacgagaaacaaaggtaagaaatgcaatgacacaaactctggcgctagcctggccatatctgaaggtagacagcgaatgactgtaagctgttcggatggtttcttcaaaaagctccgggtctataacaggaaagatgcgccgcatcacgttggagctcttatatgcctgaaagtacacctgcattgttccccagtcgggaagttcatagggattggaagtgttcatgttcatgttcatcaaaaccgagttcaaggtctgtccgcgctccttatcccaaggcgctcgggctggactaagtttatcaattgaaacgtgctgtccggtgcgagcctcgatccattcctgtccttcgggaaagaggaacggcgtgccagtgagtaaactgatgacacccaactctttgcccgcaaagtgaactcgcactgacgatgagtctggaagctgagtgttacttggggagctgctggccgtcgtattgacttcgaaagatcgaggcgaatctccaggcacttttgccaattagtttcggggtacttcttaggcctgcatattgaagaggcactaaccagatatttgatcacccagtagattctctgcaagaagctgctcgatgcgactaattcgctccgatagtcgtgaaactttggggcgtcttatcttcgacgtcagacacatagaagaacaagctcgagatacagactcaccccccctcgtcgtcccttttccttttcctctgtactactttgtcgaatgtgcagggaatattatggtggctgcaccaattacactgcggaattgcagcatcacatttgatctaggaccagtttagacgggatcgagagttgacgatgaacgatctacctttcttttgtaacaggaatcacaggcacgagcagtgcgtgtccgtggctgatccgaggcattagatccatgatccattgtatagttgagatgtcttcagcaaaaaataagctcaaaggatgtgtcggtggacatggctgggtccgaaagccgctgacaaaatagccgctgactcagccacgtcatgccgaggtccatgagacgaagtgatagagccattgatgtcaattagtttggatagtatttatatgtagaattccggcttggatcgctagccctactaggggcggttgatattcgaagacgagtgttcagttttgaaaccccgatcgggtgaaaagggtattcaaccagctgccgagaagctgtttttgattgtctctgatttagaagcttcaattcgtacggcagggtatgcttcgagaaagtcaagtttatcaatatggttgatcccatgccgcattttcgttgcaaccaaccgaccgtacgtccgtttggagaccgcaaaacagccgatatcgagtggttggctgctataatttaaagctatagaatgaagttataagacatcgcatttactatgtgttttgggtgggcggctcgcttggaaattacgtcgtccaaggacaaaaaaacagattccctgtatattttccttgtcttgccctctccacatgcgatcagaccatcgccaccggaatccccaaacaataaaacacgtccaagctcgagggagatgaatggcagctcacatcacagtgcatatgcagaaatcgcactcttcatcgccgcagtcacagccaaagcatggcttagagaccgatttgatgggctttgtaatggagctaccggagctgctggaaggaaggatgcagtcgaatgggattgaaatagaggtgacggccatggtggataaaggcttggatctattggagattgtcagtcaagtccgagcgagaaaacaaaaagccggtaggttagaaagcacagaacatcgtacctgcaaaaacaaacacgggtatagggctttaagcagtgggttgggagaaagggggaagatgaaaaagttaggcgacaggcagtcggttattaaatgttcccacttagacctcgttaactcccaagaacaagagatacgagcctaagagttgttaggccataacatcttttattatctgaatcaaaatggacccgccacacacgtcacgggaatatagggatattatgccaacataggattgagtctataagcgcacgagttagaataattcagcaaagtagtagagaaagaaagatactttgccctctaattagtatggcttcactctgtaataacaccgtcttcatcccattcagataaccgaggcagtggttcgctactagtctagtagcaagaagcatcatttacatgggaatctctcagtcacaggagtgggcgacgtagcttgaagttctctccactcgcacctcttcgtgaacacgaataccgtcattactgcttccatactgacccaccagaatctcttcatcgctccgactataacgaggtttgacatacttgccctctgagctctccgaatgcgatccatgaacgatggtgcgatataacgggcggacggtggggatgccaacgcagataagagtgacagccagttcaacggcggaccagattatgaggttaacagtgtcctctagaaaagggattggtggcattggatctagacgcgaggaggtggcttaccggtgtagttggagctggctaacccgcccaggtcaatagttcggataattccgcaaatgcaggctctagaaacgaggatgactatgtatccatgaagaatcggatgtgatacacacatgaagcccagactcaagctgatcgcgatagacatcttttccttgaatttcatgttaagattccaaatgaagatccacggaagaagagtaaaataaaagtccacggcagcacaccagcctagattttatcaatatcagtatagacatctcatacaaacagtcgaagagatatcgaacatacatccaagcataacggagaaaggggtgactgggacaacagtataccctgggacgcgatgatcccatatagatcgagacggaacacgctggaaccaaaagataagggcggtcatcatcgacacaatcgacaagctgatcatcgaggtccatattgaaatacgatgccatcgcttgataacaatacaaagcaggaaagttcccagcgagatcttcgcaatcgccattcctaatatggcaaatgtttttccaatcatttcgttatacacggccttcacagctgagtccttctccaaggtatctatcgattgtccgaatccatgcacaccagcaatcgtgagaaagacagtgtaaacgagtaggaatacctataattaggtcagcgttctatcataggtctagtcttgggtgctttgcgaatgggaaaatacaccttaggccaaattgaagatatggtcatccctcacgagtgctttcacaatatggactcggatgtagagcctgagcaggaccagaataaaagagagcaaagtcattgcccacagcacggaaatggcacgaacgcctttcccagccaacatcttccagattcagaaagccggttaaatcagaccaaatgctgcagaacaatagcgcccggggcttgctagattgagagatagagaaactaaacggcattgttgaacaaatagatccttgctctcaatatctcaataagttggaaatagtaaaaaaaggatctccgtgaactacaaggctaaaccatttgaagtcggtacacgcgcggattataatagaacagcgacagctccatgccgctcaatccgttcatttctgcacttgcagggtcgtaattcatataccagcccgttatgtgatagcctatattatttattaaagatcatcgggacgttcaggcttgaaaacggcccgcagcgtagtagcgctccttcgaggagtttgaaaagccaattaggtacttccaattggatattgtatacgaggtactccatatttcgtactttcgtccttttcatgcttttcgctattttgatgggtctatgtgtctttgcgccagcctattcgccaatcgtcggaggatggcccgttcgagcaagtcaattggagttgagtttatcctattggcattaacgagactactttgatgcacagctgagtctaggcccagcaatatggagtatggaggatcttgctatcttcgcttgacaactagccacgttttgattcgcatgcccttatacggagccacatgggatcgacattgtgagagggtatatgcgcatacgcgggctgtctatatattattgtatatcacggatgtttgagggttgaagagtgtatccagctgtcaactctccgtcacatatcattccacgatattaaaagatcgcctttttgcgatgcttgattacgggaatagagatgctgccaccatgcttggctatgcgtttctcatagcccttccagtctggtatttaacgacatatctcctctccccgctacgccgttatcccggtccctttctcgcaggtgagttgcagtatcattcttaagacccctttagcgttccgtattgtcctcttatacctcataggctggacaaacctatggcgtatgttacatgttcgccaaggaaataaccatgttgtcatccacgagctacacaaaaagtacggccccgtggtgcgcattggccctaacgtgctcgacctggatatccccgagttgatcaagacaatttacaatatcaaatcggagtatttaaaggtgtgtatcttactgcaggtggctacttgtcactagtattgatcgtagtctgtgacagaccgagttttatcatggcagtagtgcgaagaacaacggcaagatcatctacaatctcttcagcgagtgcgatcccaagttgcatgcacagcagaagcggcccgtctcgaaacattattccatgactgggattcttccactggagccccatattgatgatatgatttcctacttgtgtcaacgtctggaggagaaattcatcgatggatccaacccaactgaaacgtgcgacttgggcgaatggattgcatattgtaagttcaagcccatcgcatcaatcctttccaagacttataaatcatctagatacctgggatgtggttggcaatgccactttcagccaacccattggatacctggaaaaagggtatgactttgacaagaccctgagtgtcgcgaatgtcgccatggactacttttccctggtgggacaaatgccaattctggatcatttgttagataaaaaccccatctaccgaattggcccgccgtccttcggaaccgtcgccaacatatcaatccagcacctcacggaccggcttcagaacaaggacaccgactaccatgaccccagcaagcccgatttcctggacaaattcatcgaggccaaggagaaattcccagaggtggtggacgactcgcaaatcatctcttacctgatgaataacctggttgcaggagccgacacaacaggcgtcaccattaacgcagcattgtacttctccttgaaacatcctcacgtctgggagcgtctaagaaccgagattcccgcccacgaccataccgctggaaacaaggtggtctccttcaaattcgccaagcagttcccatacctagatgccgtggtacgggaagcaatgagatgtcatcccgcggtcgccatgctcctggagcgatacgtaccagagggtggacttgcccttcccgatggaagcctcgttcctgcagggtcgatcgttggcatgaatccctacattgtagggcgcaatccgtctgtctggggtgaagatgccgaggagttccgtccggagagatggctccgcggtgagtcggagactgaagatgcactccagaaacgtttgcaatcaatgaacaagctcgacctcacttttggcggcggaagccgtatttgtctagggaagcaccttggtctgctggaggtgtttaaggtgattgcgactctcgtgtcacggtacgatatcaaactggctcatccggagaaggattggacgacgcataatagcttttttgtgcgacaggagggtgtcgaggtgaagcttgctcgccggagttgaaacattgtgatctacaagacagggctacataggaaacacagggtacatatgcatgtagctaagacacttttacggaaaaaatccaaagttaaagattcaaagcatgtactcattcacactatatacagcagcaacttttgaggggtttcatcaatcatcgccgcagtgactggggtatcgtctagtcattcgggcttccaagccatccgtctatccattaaaataaatccttttttgttcatcaatccgtaacagagcagtcggtttacagctgctccacccagggagcaacaccgggctgcatctggttcagccacttgacaagctcgataagctcggcccgacgctcatcctccagttgatcctcgtcgctgagaaccgactggaagataggaaggaggctgggggtgagttcacggatggtgacatcctcccacttgtacatttggcagatcatgcggtacaggggctcgttctcctcgtaatcgttcttcaggggaagaatgttgacaagggcaggaagaacatccttggtggggacactatcgcggtaacgcaagatcatgcggctgacacagccagtagcattatcctggagacgcgagacgtccatctgaaggcaggcctcaagacgggtaaggatggcggggatctccttgatgatctcagcctcagcattggagtgctgaatcaaacggccaatggcgtaagcagcattggacttggtttgggagtcctcatcggcgaggcggtgaaggagcagcttcaagaagacaggggtgaagggggtcacggcagcacccatgccgttgatgcactcagcgaggacaccaacagcagtggcgcgctcaagagcctcagtgctaccagcgtagcggaggatggtcttctcgaacaccttccagagctcggcaaagctcgggcccatggcagcggccatgccagagacaacgtccaaggcagtgtcgactacaatccagtcgaactcggaagattcctcaccagcctcgagagtctcctcctcgggtccgaactcgacctggcagatatgctgcttggtgatgatatcagtgaccatctggatcacgttgtgaagcatagtctcgttggcaatgagggcaggaccacagaagcgcaagttctcggccatgttgcggttgatatcggcgacagtggaactattaattatcggtcagcaatcaagtcattgaatcgacagttgataagtaatgaggcaatggtaggagtagatctcagactgtagacttcgccgtttacatcaagtacgcctttggcgcatcaaagtgagctgggttaagcggaaaaaatcatcatagaaatggttgggcaagggaagaaaaaaaaaaaaaaaaaaaagacgggtgacacataccggtcatcttcttcggtccacatcttgacagtggctgtcatgagaatctcaccgaacttctggacctccttggcaggctgaacctgaagggggagaccaggctgccacttgggcatctggccattctcttcggcgatagcaaagagcatagcgtatgagcgatgcagagtgctgatggtgctcttgcgaacaccctcgtaagggtgctcacacaagggcatcacatgctcaatggtcttctcaaagtaaggcaggaaggcgctgcgggtgtgggtgacgaggtcaccgatgacctcaacagcaatctccttctcgagggaaagaggtgtggtggcggtaatgtcatcccactcgtcctcgtcttcgagatcaatatcctcgatatcaccatcatcctcatcgtcagcacttgcgaccttgaccttgcggccattgaaggtaacctcctgtccaacaaggtccttggcagcactgccgagatcaacatcaaggtcgctctcgtcctgctcgatgcaatcgtacagacccttcacgacaccgtcaaggaagggggcgaagtgctcgccgtagaccttggccatggcaccccagaagatgtatgtactctccttgagacgggagtgaccgagatgcaaggcttcctcagtggcacgcatgaggggctcaacgtacggctggtagcgttcaggaccagcggcggcggccatctcacccatggagtcagtgacactggcacggaggtcgagttcatcctcactgtccttgacagcagcaaactcctggaggagatgcatcgactcgtcaaagaatgagaggaaggagtcaccggcagaggaggcgagggagccaagagcaccggcagcaagggccttgatcttgaaatcggggtgcttgaagagattgtgcaggatagggacaagctcggcctggtaaggagaaacatccttctcgtccagaccatcaacaacagcatcaatagcactgataccggccttgataatatcgagtgtagggccttcctcctcgcctttgtactcttgcatggcgctggccaagttctggaagagcaacggcatgaggcgagcgtgctcggaactgaggtcttcaacgagatcctctgcaagacgagcgacagtgtgtaatgaagcctggcgcaccttagggtcctgatcagcaaggagctggaggaccatagggaagatctccttcatctgggtgctgatgaagtcgggggcaccttcaacacacatgccgagggccatgataccagcgcggcggtagtcaggatcggggctgttgaagtactgacccagcgcgttgagcaaggggacaacgacctggctaggaggcaggctctgggagagcatgtcaagtaggccgagagcagaacgggcaggggtgatatcatcatcaccaggagaggcatcgccaagctcggtaacaatttggagagcagtacgggtgagctcctcgccaatacgcataccctgaaccttgagcttgcggtactggatggtctgcatcaggaagctgatggcctgggtgcggacatcctcgtcaacctcagtgttggcagcgatctggttcatcaaaatgaccaggtccttgaggtggacggtcagcaaagcagggtcacaaccaagcagattctggaagacttcgaaagactgcatgatgtgatcctcctcttgcttctcaatggagtccttgagaatagcgaccatggcagggaccaactcttggaaagccttgacgggagcctcatcctcctccgaatccagatgcatagcaagcttgctcaaagacatgagagtgttgatccgaacttcggcgctttcggggtcgcggatggtcttgttgaagaggttgaagaggtcctggaacttctcctcgaagccttcaccgagagtatccaagatggtgaagagaatgtaaatagccacagcgcgctcagcagcgttgccattgttaccagcctgcaggagcaggttgggcaggtcagcccactcgccgtcgttcaaatcaatcttcgcaatagcggagatgatctgagcgatggagtgctggacgagagatgaactctcgcccatggtagagcgaagcaactgttcacgaatctggggtttctggaccgcggggaccttcagccagtgcttggaaacgagtgaacgggactctacggaagagagctggcgcagattctggtcatcatgactagtgcagatctggataaggaagacaagggattcgggcttgttgtagaactccttttgcaagactccggtggcctccttaaggtttccctgggaggctacatgaaggggtcagcgagacgaacatgggcttcgacgttgcaagacgaactcacgatccaggataatctgcaattgctggaggaatcgctgttgatccatgatggaaagggcaatgtagaagattttcaaatggttcttctttcttcctggacgattccagttgccccaggtctctatgagagactcaggccgcaggaacaaagattgagcagtctgtctcagacaaacaactcaaagggggtatcacaaagcaatattgacaggaagcaaaaaaagaaagagagcggaagatgaagaaaaaaagagagtagtgaggggaggagggagaagaaaagagacgagaaaaaaaaaatttaggggagtgggttggttcctgattgggtttagcgcgggaacagttgtcaacaggcgggaatttgggcagagatttttagacgactccatttatatggggttagattggtgtgcatgttgttatattacgatcatggttacagtgagcattcatatcattcatgtcagttgatccttcttgtaaagagcgcaattgggacacgaccaatggtatatcagctatacctaagtaacggtaacctgcatgctgcagaagagtatagagattttccacatcaaagacagaaacatataaaaatcccttcgccctaaaactcctctttcgtccgtcttgtccgatggagagcaaaccgtgctacagcaacaataacaccagttagcaagtgcttggatgtattgacagccgtgcatccggtggtttccagaagacccacacactaacgaagccccaaacagccgaggcatcatttaatattcatcagactcatattcatcatggagtagcgatgagcggtagccacgtgaagcgagattggcctctaggccaccttcggaggcagggtcaaagtagcctaaatatgtcagtagagttctccttattcaatagcgatgggtcaatttgcacgtaccaccgccgccaaagtagctgagagccactggtaagaagatgagagcatgcgtagcagcaaaaatcaccagggctagccaaacccggaagtagtagatctcgaagatcttgcttcgagtaaatgccaggacgcaaactccgagaagttttgtcacggtaataccactgaagacagtcccaccaacattgaccaaggccgcccatgctcgagcgtccttaccacggaattcggcgggcaccttatccatgatgggtcgagcggggaacatgaatgctcgggcaatatgagcacagaactcaacaccaatgccgacacaaatgaccaagttgacaagagataccgcattcaaggagacgccagcgatcgccatagtgccaatgatatcgaccactatcataaccactgtggttgtaatgacagcgcccgtggctatagaccccaatatcacagaggtcaagacgaagatgatggccacggccgacccaagcagggtaccagtaagtcgcacaatggaaacgtattgatcaaagaagatgtagaatttggaatatgggaagacgtcgatatcatgttcccgtgagatgtcatctgcaatccggcgagctgcaatatatgcctcgataaattcattctggctccgaagaggcgtgtggctagtacggaaatgactggcgttgatcgttttatacttgtcatcaatgaccaaagcattgctgtagggcgctttaccaccgagggggcaggatgcatcggtgggagcatcgatccatttttgggcgtaatggacaaattcagatccttccggcattcccgaaagagagatgttccaggcaggaacgcggtcctcgaaacaaagcttgccgttttctttgcaacagtcttgctgggggttcagccaatagaagaaatcatcaatccagctggcggcagagcctgcaagataagaaacattcggacgcttagactcttgctcaagaataaagggaagtgaatactcctcgcaagtggtgaatcgtccacagagctgttgttggtgacttcgttcggtaacattcacattccgagtcacgaaatagaccggaggccctgtgtcaaagtatgaatctaggtcgttgaaatacgaaatcagatacgagtcgctagggagcgcgatacgctgatctaacccaagaggaacctcggggatgaaggctagaccggcagtcaaaagacccaagaaaaatataacaacgccaactttcacccgacgatccaggaggaaaggcgcatagacccgacgaatgaagacctgcaaagtgctctctgcttcctggccatcgtagttctccccagggaagccgaacgaatttgctttgcgtacagtaagacaagggatacagtccgcacggagactctgcacccgtctctggttcagagccaagacggagatgaacatggtgatttgcaggatggcgttaatgaagacagcaccagcggcgtatgcggcaaaattcttgacagcgggcataccaacaaagatgcccagggcaaaggctactgtctccgtcagagcagacaggaagatgctaggtccgattcgaccaacagctcgggcaactcgctcgtcgatttcttcatcgggatggctgatattgactcgctcgaattcgtggacgatcaagaaaatgttgtctactccgactgccaggaccaagaatggaattacttcagcaatgatcaaggtcaccttgacgcccgctgccgagaacagtccgaccgatgcagaaacagacatcaggacaatgatgatcccgacgatccccagtgtaaatttagactgaacaagagcattggatggattggtcagcagagacctccaggtaactgtgaccgagcccagggccattgagacgtagaagaacatgatcaggtaactgatgacaacaatcttcgcatctgtgttggtagacttgttcagttcctgttccaagctgacctcggaattaaaagatacgcgaaggcctcgctcggcagcctcttcttggactaccccgagaacggcctggaaagtgttctcccagtcaatggcttttgcttcttcttctgttccctggtcgtaattatttaccacccaggtcacaatgagtgcctgggcatccagaacattccctgtgtcatcatatccaccaagaatcatttcgggcttgaggggctgcgagaaatcggggagacagctagggtcgccaggcgactttgtgcagtggctaagtctgtccttccatgtatctgggtcaaggtttgagacggaaccgccgaaatacccagtgaaggattgcacgacacaagcttctccagtcggcttgaaacaaacgtcatcgaaattgagagcctggtccaacgagatcacgcgtcgcacacgagattcgacgtcaaaccaccaagtaagggtttcgtagtccaagagcggacgtgagtcattacctgggcggttattcaccaaaaatgcctgctcggctcggaagaatggaccaaagctctgatcgaagaaatccttctcctgggcggctgcagatgacggactcacccagagttgcaccggatccgtttcaacggtgaaatttagccaccctaggctcagcagcaccactccgatgacgctggagaatattgctattgctgggaaccgcgcacaagcaccaccgattcgatgaaacatagctgacaacacagagttgagcttgtatactccatgtgatctttccatatatcctccacggtgcatgacttccccttcatcttcgtcatcgctgggcgtgggatcttgtagcaaccgcacccgctctggtttgcggaaacggcgttccttgtatgtgacatagctcgcgagagcaatgacaaataatagaaagacggaataaacgagaatgacggcaaacgatagacatggtagaagtcctacatgacatatcttgtggggggagatggcaggcaactccggacacacttccgggcagtcgacacaagaacatcggaatgatttgtcctcgtcattgcaggctttcggctttattgacaaagccttcattccttgcgggtcaggcccagtgggctctgtgtgatagttaatctggaacgggctcccgagaaacttcttatcacctaaaaacttcatgaaatggggagcgtctttcgcaccaccgccgatgaagtcaatggctttcccgcccgaggcaccgttctttacgttcttgcagctatcgtagaagccgttctggtactcctcggaccaaatattgtccaactcggtcacaagtcttttaccagatctgttttcttctgttttggtgacattgatgaaaagggattgatcgggggagcatgtaaaggtacagaatatgttgaagaagttgtctcggcaggcagggcaggacgcgataattccctctgctagtttgaggttactggaaagcgcatcgatctatgggttatcagcatgatagaattataaatatagtgatactatcgttgacgaaaacagaggccgggatctctcacctgttcatctcgacaacagaccggcccttcgctccatttgctgccacacagatttaccaacttttggcgtactgcgtcttctggttgttgcgccaggtcattatctggacagggtagttcacctccaaaaatggattgctttccacaatgacctcgaatagcacaacggcccttttcgtggattttagtttcgccctgtgcaccgacaagggtaggtgcaaaagagcccagcccaacgatcagggcgagagccctaggcaaccgcatcttgtgggaagaatgggtgtggtgcgagaaagaattctttctaccagtcttcaattaagatgcctgggacgggaacactttcaatactggaggttggccatgcactgttcggttcgtgtggggaatgttgcaggccgagctcaggagctggcgcaaggaggagggaatctgaattggaaggacaaccggacgatggagctcaatatcaaaatcggattaaaatcaataatcaagctcgatggctatgatagtaagatagagtgagtaagaggagaataaagcaagcttttagaagttgagtgacgtgaaggcggagacccgcggtacattcgtcccccgcacggtcacgcaacgaacccaagtaccttgtccaggcgctaaccgtcaggcacgatgatgtggctaatatcgtggctcgaatcagattggccgaactgacctctctgttcttggcatctagaacctacgggcaaaatatatttctatgtgattgtaaatataaatatgttctttgtccccgctcaaagagaacgtatgttgtatatacggggatttgagtctacgttataagatatgttattgtaaagacgctcatgatttcattcaataaaaaacagaaatgaccgactccgagccgaaaccgcattctatgaacaggaactccgagtctcaaacaggagagacaaatgtgattgcgtctgcatcgccggtgattcagttagcaatgagaacgaatatgggaagaacccagagagatgttaaaagatatcacatgtgaaaagaaattttgcaagccatttgcccaaggggtatcatcacaatgcaggccaggcaacataaacatgcaacctaatagccgtcatcatcgacctgttggtaaacgtggcgggttcgggtggggtccttgcgcatggtttgtccagagcctgtgaatcccactaaaagatgagcccggttagcatcacagagtagagaaagaatcatttataaggatcccatacctcgtgcattgacaccttcacctgtgcggaacatgctctcctttttgccaaaggcacctttgcctttgcctttagttttggcagcgaaatccttccatttgttcttgccttcttcaagctctttgttcgctttgaccttgcggggaatcttagcggggcgagccattccatcaccggccttgttgggttcgttgcgagcctgggtagctaatgcggggttgatatctgccgcggcggagattacaccggggtgagagagagcggacgagggaggtgccgaactgcctggggttccatcagccttgcgctttcgcgagtcagtgccagagatgggtcggatatccttggctgtcaaattttccacagttgcatatgacttgaaggtgacaaggtacactgggttgtccgatgagccagtgatggagttgattttggccgggtagaagccgtgatcgccggagacccagcgcgcaagaacaatgtcgttcaccgagaaggatacggaagtagtaggtgcagccgtggactcctctgggtgttcagaaggcttctgggaaccattcgccttgaatcggccacccttgggagcaggtttggcgggcgcagctggcttgagttcagcaatctgggtttggagaacggtaatgtattcttcgagttcagtcttaaggctgttgagttcagcattatcagggtctacctccaagcccaatgcgacggtttcaatctaatggttttaagttagtggcgcgtggtgaactggggggatttgccgcaactaacctgagacgtgcattctgtcaggtctttctccaaggaagatacatcagccatgatgagattctgattgatgtgagatagacagtgctattaggaacttgatctgcttgatgtgtatcggtgaagagctgagtggattgcggagaaataatctatctttcttcctgggcccgatcacgtgcattgtacttccgcctttctctccgccctgatagacggttttacgccactgcataaagtacatgtggatctgtacctagtgttcaccttcgttactcgtatgtggtcaagactttaatttgggaagactgggaagactgagcagtacgcagcatatctaattcagtatggtatgatatgcaaacaggcgatgaccctatagtatcatagtatcgaaaacatcgataatccactttctgcagatcgatggggatatatgcatgttaaggtctattagagctatggagtactccgtccaatatgctttatactactttgtatattccctgatttaggggtatgggaaaagtggtaacgtcattgaatggcctgatactccagcatatcggaccggggattggaagacccgggccagacccggcgacataggtacggagtacggagtctaaaagctccatatattgcattgccaagtcaagatgtgagtcagaggagtcaattaactaactaactactagttaactagttagttcgggaacagtgtgtagtatgttgtaggttaattaaacactttagggcttagaagctactcgaagtggagaaaaaaaaagaaaactgatttcaaagcagatacgcctacagccaatcatatcagccacaccactcaccgcccatccctgatcgccctcccccctcttccagtcctccagtcatacaacctcgtccatcgtttctcttggattctgcaactttcacgttggaatcgttgcatatcagcctcgtgtttgctcaagccacacttataccgcaattcgactagcggggaatttgtcctcgcctcaagcccctctcgaaagccgctagaaactcttcttcctctttcccccccctccatatccaatatcgccccccatatttccccccccccccccccccccccctttccttcccnnnnnnnnnnnnnnnnnnnnnnnnnnnnnnnnnnnnnnnnnnnnnnnnnnnnnnnnnnnnnnnnnnnnnnnnnnnnnnnnnnnnnnnnnnnnnnnnnnnnnnnnnnnnnnnnnnnnnnnnnnnnnnnnnnnnnnnnnnnnnnnnnnnnnnnnnnnnnnnnnnnnnnnnnnnnnnnnnnnnnnnnnnnnnnnnnnnnnnnnnnnnnnnnnnnnnnnnnnncccccccaactctggaattttactctcggttcttacttgcgacggatcaagattcaacataatatcggattgccgagattgctcactcacaaatccgaataagttgtgaaacagccgtgaagctatactgcgaggattgaatcatcctccaaccctcgtcgtttcacggcatccatcaatatctgttacgggcgggaggcccggttggactctgtattgaaatccattcatttttcatcacccttgcttttcttgtctctcgtcagcccctctatccattggaagtagaccgtcacaatgggtgattacgaacgataccaacaaggtctttacctttcccccaaccaacaagacctcttactagccgctctatcttccaacaaccccagccaaaagcctcaaagtggctctcccccaatcaagtcctctcagagccccgacgaagatcccccaaacgctcttagcaccgacgatccccatgccaacaatttcggatttggggacgacgaaagcccgttcctggatttcatcccggaggtggacttcgatttccccggctcggctgacttgattggtgacctaccgggattggccgactatgatattggcgggaagcgaaagtctctcgacggcaagtcggacattgaaggggaagaaaccggaaagaaacgtagggaaagtgaggccaagaagcctggtaggaagccactgacttcagagcctactacggtatgccactcttgctgcacgcggaagttgctgggactagagtcgtgaactgacgtaattgagcagaagcgcaaggcccaaaaccgagccgcccagcgagccttccgcgaacgcaaggagaagcacttgaaggatctggaggagtcggtggagaagctgcaaaggacatccgaaatggcaaaccaggagaatggcttgctgcgtgcccaggtcgagcggttgcaggtcgagctgcgtgagtaccgaaagcgcctttcctggatggcctcgggatcaggaaacgccatctcggctatgagctcgaattctattccgggtgcccatgccaaaggggcctatggcctccaaaacaacgagtttctcttcgatttccccaagtttggcgatttgcctgggggtcatctcttcaacggaccggccaacaagaaagatcaatccaaatccaatgacaacgtccctcgggcacctggtgtcttgggtcgcgacagtctgaacagtccctcgtctcgatcgaattcgctttcacagtcgaacaaatccaagtccaccggaacttccaccaacgctacttctaccaaatcgccttactcgggcttcaagccttccgcaaatgataaatctactacttcggaaaattctccatcgtcttcctccgactcgcaccagagccagatgctgtcgtcaaacgggacgtccccagaaccaagcatgaactcttctccaaatgggcagtaccgtgagctagggccaggggactcttgtggcgggcatgtcaccaccgatggagagaaatccttctgtgaacaacttggtatggcttgtggcaacatcagaaatcccatcccagcggtccgggatagcaggtccaaatctcagagtgtttcaagcggccaaccaaccccgatcgatggtccagccgggggcgaaggctctcaggatcttggaattgattggctggcgcatcagaatggcgggcagttcgatccagtgctctttggcgattggcgagagccccaggatgctgtgctctctcaggatttcggctctttcttcaatgaagcattccccctgccggacttgggtagtccctcccacaatttgtccgaggtcgccactgacgcggccgcacccaagaagaacctcatttctcagattgataacaagctcgaggaagatgaggtcgttccaggcgaagaccagtcgcagatgctgtcatgcacgaagatctggtacgtctatcctcatataagtattcaacagtttatcttcttccagatgactgacttcattttttctctagggatcgtcttcaatctatggaaagattccgcaacggcgagatcgacgttgacaatctctgctccgagcttcgtaccaaggcacgatgttctgagggtggtgtagtcgtgaaccagaatgatgttgatgacattatgggacgagttaagtagcggcttgcttccaggaagctcaccgtcactgccgcccttaaaacaactcatactcgggcttaattcacgattcacggaccaacaccaactcattgatacttgcgctctcttgatttatacgcatacccatcgtcgattgtcatttatgggaggaatcctgcccggcgtcatgaatacaacacaggataaagaggaaaaactcataggagaggagaaataacatcctatttacgggatatctgattttgaaagcgaatttttttgtcgatgcccatagctggcaatctatcagtgccccttctcaaggggacaccacattcctttttttcccctctgctctctttgcaacagtaattgtcatttgatttattttatgcttgttctgattgacaacattgagctatgggagacaccgtctctggccatgagatttcagcaaaaatggaatggcacttcaaatgcctattgtacggaaagggaatatggcgaaattgatatactactttcttttgcagctgggacagaatagccctgctttgcgatgttcaatgtacttttctttttttgtacacaatctattgaatggatctcatctctactcgcaattgactcaattccactaacccagcttgattgagcatacggtaataggaagacttgtaggtgcgcaagaatgagtacgaagtagcaatctcgtagatctacaaactccagaagaaggaaagctgtaagggtatcgatgtggtccacggacgtaaaaaataaagtacaaagagaaaagaggtgaaagggtgcattctttttttttcttcttttcttttctgatgatgttttctccatccattcctccctctgcaaacaaaaaaagaaactgtctggagctcaccgaaggactctcacttcggagtccagatcaacgctgcaattagcgtccatgtcccgtgtccctgaccagacctgagaacaaagaacataaaagattgagcgctatcagagtcaaataagggaaaaagaagatttgcaaatgggacaagataaaaaaagacacaaaagaattagagtatcaggtgtgtaagatcgaggcaatgtcaagggccgggggaaaaatatgagacatagaaatttgtatgtcaccgatcaggcgtcgccggatgcgacaggcttgtcgcctgagggggtaggagagtcattagggccgctcttgaagccaccccggcctcctccacgaccaccacggcctcgctcgccagtgccacggccgccgcggccacggccaccgaatccaccacgacgactgccatcgctgtcactggcgctctggtacccacgcggggcggtagtgatgccaccccgggtgctggactgccaagttccggcattgccgacagcagcacgggtgctgcggtcctcgaagaacttgaagttgggcttacgtggctgaccatggggagtggaaccgggcttctttagctcaataggcaagtggtccagagccgccttggcctcttcgacgcccgagaatgtcacaacgtggttatacttgccgagcttttcgatcttggtgatcttcgatctgtcctcctcagagatgaggtcacggacggcctgttcgctttcggcgcttgttacgaaaagagcatttgcgggcttcttttcggcacgtggtgcaggtgattcactcagcttttcgtgcggggcaataccgttagtctcggcagctgcggtcttctcctccccggtgggctgagcagaggcggcaacaggtggctggggggtaatggacttgggaatcacgggaacaggggaggctctcggtcccttctggccctgaggaatgggtgcacgcgcaggaggggcctggccgaactggggagccacgacgggggtccgggctgcgcctgtcggggcgggtgaggcagtggtcgctgggtgaccagtagagacaggttgaggggcaccacctgcctggggtttgccagtgcggtgggcgaagttgaatccttgagcccgcatctctgtcgcgatgcgtccaccttcaacctccaatacgagatatccgaacgccgcatcggccaagttgaagttccacatattcttgaatgcactctcgtcgacttgtccagcggcattaccagcggcaacggggccaccgaatggattaccgccgttggcaatggaaggcatcttgtgaacaacatccagggcattctctagaagagtcttctgtccatcattagaggagatagctgcctcgacctcgatccggaccgtctcccagacatcgttaaatgacgccttagaggcagcaagcttgccacgataatgatccaaagacgggttcacggagaactcattgtacgaggaaccgtagcggaaatgaagaccagcggaaattgaaaaatcggccttgagggtgacggaaagctggttcagcatgccctcgcgggcaggagaagcgtgagtgacaaagatacgagtctcggaggggtcgtagacacgattggcggtgtcgatgagttcgcccatctgcaaaagtgtcgtccacatggtaccttggccgccggcaatagtcgtctttccttcaccattgtcgaaaagcttgtgcatcacgacagcacctcccagacccagcagacggagcttcacaccgccgatatcgagaaggcgcgagttggcctcgtcgataatgtgtagcttatctaccttgtattcacccgagcggaacttctccagcacgcgcacatcttcgcaggcaccccaaactgtgtaaacgggcacatcaagggtgatgcgcttgtccagtagcatagagagctcagagaggggcaattgctcgggcgggaagcgctgcttaatcgactgctgaggagacacctgtgcgatggaccgtttcacgttctcggggaggaggggggaatattgtgccacatgcttcaatgtcctgttcgtagattcgggttagctgatgctgtccagtagatttcggtgcctggcgaggcgaatgtgttgggcagcaaacacgcgccgaaaagcttcagaagaatactcacttgtctgcaattcgctcgagcgaggtgtcatcatagaaaccaaagtcaccggtgtgaatgatgtggtcggcgcgggcctgcttcgcaagctcgttaagcgacttcaagttgcctgttttacgcgtccaattaatattgtgtcactttgccaagaaagacattgccataatgtagttacctcgcacgtctgcaatgcacaagattcgtgtcggaccactctgaatcacacggccattgttggggagaagcggcgtggcaccggggacagggcccgcagccgcaccattcgaaatagggtagccttgagcaccgaagttggggcggggctataagttaaaaggagtgatgatattagccaagctctccaaaatctcaagatatgacattcatcgcgattagaagctggggtgcgcaaatgcgaggggaggtaaggttagggagccacctacagaagccatgggggtgttgaattagatcgatgtgaatggtaggatgtgaagtgtagaaaaggatgaaggtggtgtcgaggggaaaaagatgtcgaggattcactttctcatcgatgaagcagcaggcgtgacatgaagattaggtaagccgcccctgggtggacctctacaaacaacactctttatatgtccatgcatgggacctttgaactgattaagttgattcaatggattatattgactagtttgactgatttgactacattttattactcttgactgtttttagaatgtggtacttttgtgttttttccacattgggccgagatattatcatagagcatgatctcgtcctgagctcgtgaagtctaacattggtgagacagtccctcctcgcccgatcatccggggtgagtactctatgtaagctgtgagagatagactgaaggaccctaaatcctatcccaagatgtctcttgactatcaggtatcaggcatgtaggtcacgacaatccatgtgtatcaaagttcttcgatatgattcccaaacaggtattgctgcctatctaccatctctcccactggctccaacactgctccacgtcgacatgataaagattgaatggatcgagggcctttcagtgctaacaacgcaaaatgtcccccaacagtcggacgggccctacacaaaataggaactcctggctcatttccgtgcgcagaggttgcaacataccgatcagagaaaggccaattgtgttttccattggtcatgaacgaccataagtcatcgacgaactcgtccctggtgctcgtttcaaaggtaccagccagccacatattccaatccgatttggcccagtcttggcgattatcgagaggaacaccatattcaccgcgaacagatgtgaaaaagttacttcccatttgataggcagagtcgggaaatgtattcaagcccagcaatacatcagggaagagattatatggggtcttccaagtacctggccagtcaggatattccaaaacaaaatgtgtctggtctttgtctgttcctaagccttgctggaagaagatatttgcatgctggtcaccagcgcgggagtaaaccccatctccactcatctccccaaacgccttgaggccaactgcggccttgattgccagatttgtctcgttcgcgagaggtccagctgcatcatttgacgacagctgattggcaatattgacactattttccagcaagtaatttgcatacttctggaaaacctccatgtaatgcgcagaccagtcggtatcgccagtggctcgaacatacgcagcagctaaaataagcagatttccgcattcctcgattggcatcggctctgctttctggtcatcgtgcccaatagcatggggataatgagtgccaaggtcatgaatcgtgtatggcaaatgccagcgaccagcagcaaggtacttcataatgggctccagcaatagtcggatgtagtccggatccatgacgtagtaaatcgggaaggcgggcatgataacgtcgattgtgttggtatttccattgctagaaagctccttgatgaaagccaacacctcaccggtgtcgagagagtcattgggaattaccaagtcgatgcctccgtatgcttgccgggtcgaaagagctaggatatctgcatacttgggacccgcagcggcagaagataaggcgaccagctcccgatccagtttcaatgactctagcaatgcgttgctatagtcatccaagaagaatgagagggcgctcgatgtggtggggtactctgcacgatagaaaccagtgtatgcttctccaagatagttgatggcggcttctctttcgtacccgaccacgaagttcacagaatgcccaccagtgacgttaccaagattgtgagccagtgcgacaacacttccctcagcccaggtatcgtcctcaccagatagtttaccatcctcaccaaatagccttcgtacatcctcgggacttcccgagagagcggttaactgactcaagctagatgatcgagaggcgagaattgctgagccccaaagagccatgtcgtctgcctcggcatacagcggtgcgtcttcgaccgtgagcgagtaaatggctaggccgtcttgctcttcgaagtcgcgctgtgagtggctttttccgccagtccacctggcatcgatatctgaatagatctggatctcatggccgcgcgtttcagctacctgtactgttaaataacctattctcccagtcagttgaggatatccacaatctaccatattgcacatcacccactaaaaggaagagactgccgaacatagtttgacggtgacacaggcgacaagaaatccagcttaaatgccacgggtccagccgtaagatcaaatatcgaatgcgtagcggtaaattcagcgcgacgcaccgtcgcagggcggatattgcttacgcccatgtctggaacgcccatcagactatatgcctggccattcacacggacaatcacagaccagccgaactcttggccagcccagaactgaggttcagcatagggcaactgctgtactcggtcgctgggcatccatgccgatagatacgggttgcggactgctagcgggtaggacggtgggaggacagggtgatgcgttacggaactcgattcctggcccgagtagagggagagcatcgatgcatagagggggcctaagcccagtgagcttagactaaatcgcatgttgaaattggtgcatgtgttggaggttgaagagtgtgaccaaacgagccgggcgcatatattatgaatggcaatatccacggcctagatggaagtatattgaagtcagaaactgaactaaagaattccttgtcgatcttcctgcgtcatattggagggggcccccacagtacttacgcgttcgcaactatctacaacttcccaattcgccgcccactttcatcgaaatgaatatgctttccagacacgagcgcatcctagaggtaatgatcaatcccaacggtcttcacaatattggttaacttcataaaaaccggcgtgttccctaagcaatatcttcctcgaaggtagggctggaccgacctatgaggaactcatcaagtaatgccaccgttgtggtattagctggtaaagtttcgccgagggttgtcatccactgtcaacttgccctgagtgcctatttcaccggtatcctccccagcaaccatcatgcgctagtaatactaggcaatcatgccattccggaacatgccaacaaacacaccgttgcaccaggctgtagactcgtcgtaggagccggcgggatcgaacttgccacaacgctagccgtggataacggcaggtcgtccgatgagatatcgctcatcttggccggtacgaatcggcaacgtctagacaagtcgtacaccaccttcagatagggcttcttcttagcagcctagaccactgctttgcactttaaaagatattcatcaacatttgtcgtaacttcaaacaagaagaaaatacaccactttgatgtcgctggacagcggcttctcccggagaacgtgcaagtcttgctcgagcttgattgtcccctccgcgtgcacgtagccgtcgcaatcaacagcctgtagatcgggatgcttgggcatcttattgtggatgatgtactgggtcatactgtagggcgccaagttcagtccaacaccaaggctgagaacacggtattgaccgcacaccatagtctagtggcttgtgaattgagtttgcttttcgcgaagtattgcaccgacttggcagggggtatcattcagcatcccctcgaccaaagggctgcggaatcaccattgcaatccatgcatgcaaggaccagttggaatatgaacgcggtcagctaaagattgcacagtggcaagaggttgacgagagtatagatcaggagtgaaaaacaaaagagtaattcaggtcgataaagaccgatgactcagtaaaacgacccgaacatgaaggtgtcatggaaagtccatggaaaattcttccaagtctcccaaacaggtatgccaaaggggtctggtcaaggggaagatctcaatctcagggggagcatcgtacgtagtcacaccccacccctttctccattttacattatttaagtcaccgttgcgcttcgttttctttgattaattccacatatactacaacgtgcagaacaagaagtacttgatatcctctgtgatatcctctgcaagaccccggcgtcccctacgtcccgcccccgcaaaaacaacctcgcgctagcggaagatcagcattgtctcggagaaattgcaagcgacgcgcgtgacaggccatttgtttcgcctccggtctcaccttcaaacatgaacacaatcctcgcgttcttccacgggctagtcccaagatgtttacggaaatccgatgtcacaaattccgacgtctcgaggaatcactactatatacccgtcatgcaaagctcaaagtcccccatgagcgcaaccaaagagcataagatcatatcaattccgatttcatgcgcatccccgccttcttacaacgatgtaagcggcgccgttatcataaaccaggatggcaaacctcacttcctatcaccagaggaagaggtagagcgacgacaccgactgcagcaagcagtgcgcgagaaaatgttagggctaccacgaatgaccaagtttgaatggtatcacagaacatcgggaactacaggccctgtgagcgaggaactaccaccaccgctgtataccccccgagaagatgagaagaaatgacgtcataccaagtgctggatatgcagagtattgacagagcgttggattccctactcgtgagcaggatacagcccgcagtacactttatatagactgcaggggtctttgtatgataatgcaccgagggttcacctttgaatttcatggccttggctattatttatacaagaattgcattcgtagatgtatgcgaggctagttccggaacagtctcaagccaccttcctcccgatcaacatcatcctcttcatcgctgatatcttcatcaccttcaccgagcaagccgctggccgttttgccgagcagagaagcaaagaactcatctcgtgcgcgggtagaccaggaaccacggtcatcgggggccatgaagttttggagcttttcatgcacagtgtacttcattttgcggcccttggaagcacgggtatcaatatctcgcttcaccttatcgttgcgcatcccagtaatggggtgaataggcaggcgcgagggcaactggtgcaggttgtcaaagccactggtcatagaatcggctgaggacatgcgctgttcaacaagatcgcgcaaaagggactggtagaaagccccatcatcgtagagaggttcttgttgatcagatgtgcgcgaacgcttcgaggatcgttctccaatctctgtggcaacttgagcatcgagtacggctgtgatggtctgttgacgaccggaggtagaaccgagcagtttgcctctagcattaggaagagatgcagaagtgccacgaactttcgaggaccacttgtcgagaatggaacgacggtgcgaaatggactgagactccaattcagccatacgttcccatagcgaggtagagctggtggtaggcgaagcgggggagggtcgcttgcgctttttgctgccttctttggcggtggcatcggccagggcagtacgtaaaccttcgagggtcgaccataacgccagagccgctgactctgccgacttgattgcttcctcatcaacaacttcttcttcttgattcatctcgttctctccatctgcttcgttctttgaacccaacacagcagcaataccgttaatagaggtcaatccactctgaagcttcatccgcgcgttaaggagcgcatcaaaagtggtacgttgttgcttgacagcctttccctttgtagcatcggccttggctgccgaggagatcgtggcagcgatagttttctgatccgttgccattagtttccgaatctcgtcgcggtcaacagacggtccgcttgtgtcgccatgtcggacatcttggagcgttttcttggagtgcttgtcgactacctcgtcggcatcctcatcatcctcatcatcctcttcgctctcttcgtcatcgtcatcctcgcctccctctgtgtcctcatcggaactctcctgggccagggcatcgtcgccactggcagattcttcggagccagacgagacatctgtgttctcgtcgccttcatcactttcggcgcctagtgccgcccggctgactcgggcaccatcatattgcttccccagtgggagggggtcatctttgcggagctttgctttcctgtttgattattagcgcgttgttgataccaaatacacatatctttacacacccaacagtttcataatgctctctgcctgccgtcacttcttctttatcttcaccttcctcgtcacttgattgctgaccattatcgatatcctcgggatcaaaatctaagggcgaagttagcattgaatgtccagtactcaagaggatctgttatgcatcattcaggcatacctttaggagttggatcttcaaaatcagcaagctgatcagccagggaacgacctgcgcgtggtttacccatggtgtttggtatgaggagagaatgagagattgccgagcaacttttttactggtttttccggataacggattattattcctatctaggtttagcgcccgtaggcagtagaggttcatgtgggcggtgtacagcgtaagagcttcgactaaaggcggtcggcccttttcttggcagtatcgcagtggatatcttgcactacatattctagaactacttctgttgctcacagattattaggtcctgcatttttttcttctcatctgcctcatttggcctgtgagtatgttggttctgccgtctagctccatcactaggggtgcgaggcttttttctacatatcttgctcttcagcatgagaatcctttggttagttgttaatctacatttcagagctccggtggttgcctctcggctcactaattgactctaagaaccattctcatttgttacaagagctatttcaatttgcattgactgactatgaacagggacttccacgctctggtaccccgccaacttttcgttcgcgccgagggctgcctgagaagcgcaagattcgagatgttaacaaaattgttgcagtctcttcagcaaagggaggagttggaaagtctacaatagcgggtacgtagatattatcctcctatctaggcgcaagtgtgagcccaaatggaacaaacagtcgctaaagagatcttatcagtcaatctcgcactatcatttgcacgccgtggtatcaggactggaattcttgacaccgatatattcggtccttctatccccaccctccttaatctctccggcgaacctcgcctcgacgaaagtgagactccctttctaagcttaccaccatttcagccataatcaacatgcttatgaatattgccagacaactgcctcgttcctctaacgaactatggccttaaatcaatgtcaatgggctatctcctcccccaaacacaagccgacagcacaagtggcgagctacctatggacacaacaccaatctcatggcgcgggctaatggtaaccaaagccatgcaacaactccttcactcagtgtcgtggggaccactggacgttctaatcctcgacttaccgcccggaaccggcgacgtgcagctcacaatcaaccaagaaatcatcatcgatggggcagtgatcgtatccacgccgcaagatatcgcactccgcgacgcagtgcgcggcatcgggatgttccagcgaatggaagtgcccgtgctcggaatggtacgcaatatggcatatttcgcgtgtccacagtgcgggactcagacccgtatattttcgcatggtgatagccaccaccacgcgcacggtgagaaccacggcgtcgtggctgagtgcaagcggctcggagtggactttctcggtgacatccctctggatgctcgggtgtgcgaggatgctgatcgtggaatgccgactattgttgctgaggagaatgttgagcgcagtgcgaggcgggaggctttccttggtgttgctgagcaggtagctcggaagattggtcttgattggcactgaagggtcgactcatcttgcccagacgtagagttatgaacattgtgtattattatatcagactcccatatccggtggctggctactggctatttatctcggcattccgtttatctgggtatagactgtatttattctcagaactatgtacttccatctacaaatgatggtcgactgctagaggcctagtaattgactgcaaaaagggtatatccaacacaaggaaaataacaaaaggaaatgccaagtcgctgcacatagtttcaacaaaagagccagcaatcgaaggaaacttggacatatttaaaacgactgttcaagaggatacggatatgtccgtaaagcaattctacaaagcttactcggcggttttgaaaacctccctgtccggtatttcaggacggtgggatgtggagtctcgaccagccgcggagaaaacagatagagtatctgtggaaggacggccattctcgctaaccaagggggcaataataccccgcgcgccagtcacagcttgggtgctagcagtatcggatgccatgtttgtataggcgacggagtccttgtcgccgccaacggtactggtagtctccgacaacatttcgcttcggtcagcggctgatcctgcagcggatgatgaccggtacctgctgtgagctaaggaaagatcggatttcatcgggagagagcctgttgcgtgaaagagagccctcgtgctggcgttctcatccgtgaatttgtgattgttcaccccgggcaagataaggatcggagcagcacttttctgtgagacgggtcgagatgcagcctcggaatctgtagacatgcgtccaatagaagaatcgccgttactgaggcattccgttttatcctggttggctgccgtcggctgcgatttgttgtcggtgaggtctttatctgttctgctttggggattcgtcgctggagtgctagaccatgttccggcctgcccattatcagtgctgacacgggtggcacgtctgcccgattgctcgatccgattctccatttccattctgcgctcgtcatgtttgcttccccagccgctccacatcatcatgccgtagttcttcttggcatgtcgttttggtaggacgccaggagcagctcgccgggcggccaaagagctcgggggaggacattcgccatcaaagtcttggaagccatgcgccagctctatcaggcgtcgcctctgaacccgaagtttttccttcgaaaatctgatatcccattccttctttgcatccagccacattcgaatgagcacggggttgattgccccgatttgggcagggggaatttgtaacgatgggtaggaagagggagtgtctagcgggaagacatgtcctcgtttatcaattcgttggcgtatcatgtattgatggaacgctggaagaggatctccggccttaccgacagaggaaggcccacgtgcgttaggcagattggtcaatgcaggttgaggccccggcatatcttcatcttctgagctgtttgacgaaacgggcgaaagagcactatcatccataatatcgacctcgccgtgctgtgcacgcgccaaggcccaagagccgaactgggaaatggaacggaacatgtacttggctggtcgcgtaaagctcagagtgggagcgacatgacataggtcgtcccagacctgaagttgtacataagtcggttcgtacttgttcaaaatctcccgggtgggatcattctcatcgagatatacgtcgctcggtgggtatgccgatggattggccgctttgtgggcgatgtagaattgctcgtcacgaagcgtttcgccgccgccgctcaatatttgtagaggaggcaggccacccagagagggttgtaggactggcgaaacaagagggtgggacatgagctggttcgtcgtgtaaaactggatttggtccttgagttcgactgttttcccgcccaaggcaacatgaatattatcgggttcggcatccaaactagcaggatccggggcttgctgctcgccagggtaggaatattcggctgcagggttctcatggatagtataaccgcggatagcagtctcttcagcactgctgcgcggttggggaatagccttattgagatcctcggaagtcactattggttggcgcgacagtcttttcatttccaggatatcatcagcattaggaggaggccaagcggacgagggtttatggcggaagccataggcaggaatataatcacctgggttgtcctgaacaatactcgggaaagagtgtgttaaatcaacccagggtgagatcaagatggcgcccgcgggtaagggaataccctggtctctcataacgaccagcatcgatagagccaagcctccgcccgcagagtcaccggcaagaatgatttcctttggttcataggacttgagcagccagagataagccgccatacagtcatgcaaaccacatgggaaaggaaactgcggcgccagtcgatactccggtgcaaatacacgtcccttcagtttacgcgcatggcgctgcatcatgtaccgatgcgtgtcgacacttccgaagaaataggccccaccatggacatacagcatcacacggttacaatgcccaccggccccctccgtttgagcgtagtggctccgcatctcaatccactcccccttcatctcttcggatggcccgcgccattgccaccatttctctcctcccacccgtacgatacctttggggcccagctgctttttgacagcgtccgcagcagagcgcaagaactcgtccgggattgtgacggtctcggttctcacccaatgtggacttgggacccattggcgagtgaacgcctggaagtcttcgacggggtgtttggatgcataaaataggaattggcgaatgatatggataccttcatcgtaggtaatgtgaacggtgggtttgtcccgtaacgatttacgatgcaggtactatggatcatgcgctatcagcaagacaatccttaccctatcagggtattccacaacttacgtgactgatgagagtatgaaggacagtgggagtcaatgccacacctagtgcgactgtatgtaatggcataattgttctgttcggtggaaagagagtagcaggattctaactgtcgcaaaatccaaggaaaccaaaactaggaatcagacttaaatgaaagacaaaagcgaagatcggtcgcaaaatgggccgacgtcatttaaagagtgcaaggggattggaagaagaaaagaagaacatccaaacccaaacgagaggcgatgatgtcaccgggcctcggggaaaccgatctgcacctgacctccgatcacttaccccatacctccagcctttacaaattaggtctcctcggtcttccaatccaactgacattcacaatataaaccatggcgatgacaccagcaacaatactagttgcaatgaccgcccgacgcggtgctttcgcaagcttgaatccaagcccaacattgatgatacccagaatcatcatcaaccgtccaaaccagcgatgcgtataggcaaaaggtccttttctacctgtcttccggaagaatcgatgctgcaatacacccatagcaggctggaaaagaataaggcttggtacgatgatcatccctaggatggtatggtaagagttgaccaaatcaatctgtcgtgcgagggaaacaccaactccaaagcccgcgattaccacggtcagagtgaggagttggaacgttccgtgaatgtccactgtccatttcgatgggaagagatgaagtccgagcgcgaagaaagggaacatgaccacaaaagccagaaccatgagcacagcatgggctgtctttttcctcttgactgttcgttgcaaggctgcaaatgccggatcttcactgggagagatgggcactcgggctatttgggcgaagggattcactgaactgccgcccgtcgcttgtttcaggtcgacattcatgacaccgtaatcatcatgttgggtgataccctcagataaactgaccgaattcaggggctctccatatttaacggaccaaatccacggacttgaggggctgttcacgttttctgttcccccattccattttaggcaggtatcgcatcgaacattggcagtgataactccgtcgtgtacaccactaccattcagaatggtgatctgggcgtccttgttatacaacggttcaatttccccaacaccagaccgcggagaaacggtgaccttgttgccagacgtgtacacgacaaacatattggcgcctgccatttgcattccttggcccaaggcaaaccactgcacttggcgagtagaattcatttgaaagtatatggggcccgagcctgactcagcagtattgtcggggacattgaagctataggtgatctcactgtggccttgcggatgaatgctatgaacttgggccagggcaggaatggcccagagccaagcgaaaatatgccgaaccattgaaaaaaattgagattgacttatgatctaacaagggggtcatcccaataaataccctcagctctttgttgcacggttgacacaccaattgggctgcgtcaggccaagtctttgtggctgtgacttatgaatttcttacagacatttggaatacctgtcaattggttgaaatattatcttacacgatgtcgtcgttttgtgtctgagctacctaaagtcaaaggtaagacgactttgctgcgcctccccatgtcaaacatgatcagtgtcgggtcagccgcatcaattatcaaggctacggcaattctcagtgaggtcttattattggggacatatgagtggtcaaccgacattgatggctagagaaatgtccataaaattccggtgtgcctatgcttttggagtattcaaccgatgcagtaatggggaaataaagttaggcatagcttcaagcttatatctgtgtttatacgaggtcaagggtgtcatacgaggggaaaagaagacagttagttatacagcatctcatttactgtcaaactatctgtcaaactatctgtcgggataaggacgtcctctattgcaatgcataatgacgtcctctttgctcttgaattttccttctcgaacgcctagcaacgctacaattaaacctaccgatgaatacggcttcacccttgtctctcccaagaaaaggtcgaggttcatttcgacctgcagagtcattcagtgtccgaagcctttctttgtaacctctgctatcctatcgtagaaaagtgggttcgtcccaaccctgtctctactacatacttcttagactgataaccttacataatattgagacaatgcaggaagccccaaggtccctttccacgcggtacataacggcactctccacggagaatattcccacttttttaggaagatagacaaaatgagctcaaatgattgcagaggatattgtcgatcgcattctcgtccctttcttggcaacgcagaaggtccccaggaacgaagtgtgggatgcactaacaagttgaacataaaaactacaatccatttcagatgctgatgctgagctcaatcacagacaccatgcttggcaaatcatatttcgcagtggttatgatggccgctcaggctttgcctgtattcggagcgacgagggaacgagaaatggtcaaagtgacagtctccgagacggttcgaggtggtgaactagctaacattcacctcgactggcttggccaaccgccaactttgatcaaatctgtctatgcgccctgtgacaatgaacattcgttggcaaaagagcaaattatcggacagttttcatttcatggtcgccctccacagcgactggtttgggtggttccagatgaggctccgacgcaccattgtgtttacatatatgggtctggcggcccaaatatgacgcaaagggtcttaggcaaaagcagtcctgtctccttgcagaagaagcctaggaaacgatccacggcagacaccatcccattgctgaaggactttgatgcgcagggagcatggttcgacggagtggccaaaatcaaagacaaagtggaaagcagcggaggcgttgcttcaaaaggttcaccaaagaatacctcaatcgcaattgttggaggcgggatctccggacttgcaacgggtttgatgctggacagcgtcggtatacataactgggagatcatcgaagccagcgaccgcgttgggggcagattccggacgaaatatgtcgcggacactcaagagtgggctgagatgggaccgatgagacttccgtactctgtcacttacagagatgacaatgagaccctcctgtattctgatcatcagttgactttccaaatggccaacatcttgaacaacatgaacaagaatgactcgcagtggaggattgatttcatcccctggatccaacacagtcccaatgagttatatgctcaaggaactcgccgtcatcccgatggaagaatcccaactcgcgctgagatcgaggaggatccaagcctgaaggacgcctcagaaatgacgagcgccgaatacagcaagaccgaggatcagatgaacaaaattctaaaagatgaaaagactctcaaatctcttcagaaggatgtctggagagcccacaagaccgccatggaccagggtctcgatgactggagcgaacaggcaatgatgcgacatgtcttcaaagccagtcagaacatcaccgacgagatctggacctcctccgactacgatgtattctgggacgagctgcatcataactccaatctcggcctagatggaagcaaggacagtctgggcgaaacaaaatggctctgcatcgatagaggattcaaccgcctgtccgaagcttttcttcctcacgtccgcgacaggcttactctcaatcgaaaagttcggaaactcgaatcagtcaagggcagtgatagtcacacccgcactcgactgtcatggtaccccaatgtctcgaatcgcacctttgagtccaaagagtacgactacacaatcatggcagcgccatttaccatgacccgcttcatggatctacccaaattctcctcggtcttagaccgcgcgatcagcgaagcaggtctacgcttcaagtccgcctgcaaagtagccctgttattctccgagcgattctgggaaaagggcgaccgaccgattttcggcggctactccaagccattaagtgactcagtcggtgcactctactaccccgtctacggactcaacgagtcccgcccgggtctgatcatgcactatcgaggcggcgattggagcgaccggtttgtgagtttctccgacgaagaacacgtccagacagtgctggattcgattgtcagcctgcacggtgaacaagcacgcgacctttacacgggtgattatgagcgcctctgctggcttcaggatgaatatactgcgacttcttggtgtcggccggatgttgcacaacatcaactatacattccggcttatcatcagacggagcataacaccattttcattggagagcacactgcgccaacgcaggcttgggttagttcttcgctgcattcttccgttcgtgggtcggttcagctgctgctggagttgggtttggtggatgaggcgaaagaacttaaccagcggtggatggggagatggatcaagctatgatgtttctgtcaagctccttggtttggagtatatcgtagcttactctaattaaaccattttcggtattttttaaaaagatttatgatagtatagtattaaaaccattatcgatgggggacagtgccggtaaaagctacgaatttactgaatacactcatagttggaagcgcttgaaaattaaattgcttagaaaacactagtacatgacgggcataagagggttgcaatgtaaagacagtcgaatagacattcgtggctccttgttgcgtattgagacgtgggcaccttttgtgcgggatgtgtgagcaatgaacaatcactcaatggtaatcttcttggtggtcgaggtagtggccttgggcacaataatagacagaatgccattggtgaggctggccttgaccttgtcctgatcgacactaacggggaaggagaaggtacgttggaattctccaaccgatcgctcgctggcccagtagcggtaagtgggctcagacttttgctcagacttttgttcagacttctgctcaacctcatcgccctgcgcttcagtctcgggcacagaggtgtggtactcgcgttccgcgcgacccttcacattcagggtctgggggtcggagaactcgatgtcgatatccttttgagagagaccaggtagctcgccgtcgaggtggtaagagtcatcgctttcgcggacgtcaaagcgaggggagaacgagcgagctgcaggctggctacgaccggagcggtggacatcatagtcgtcaaggagacgaaagaggggagcgaagtcactggaaccaggaaggctggcacgcaagagagacattttgttgaatagatcagatatgcttggagagcaggaagtagtgataacttggcttgtgaggatgtgttgatgatgaggaaaacggtgggtagttggggggcattatatagccagaggacctctcttctcgaaactaccctccatatttcaggcaatttctggaatataccacaattgcatcatgagataaactgcccggcttgttgtttccagctgtcagtttgttacttctccaagatactagatgcttctccacatttccaccacgtgacacgaaaccatagggctatttttggttcaagaagcaagaacggaaacaaataaaagaagaatataaacttagggcttatgtgaaggccaatcagaacagttgtcaaacaagtataatgctgcttatatccgacgccctatgtctatatacagttaaggcattaaaacattcaaatgccagagatccattgccaagaggggttggagaacaagtcttataaagagacccgaataatagaataatagaataatagtaaaataaaaaaaaagaagagggatgtagaatcttaatgcacagaaagggtcatcggcgcggtacaatcaggctatagaggcttagaatgacgggctagggctacttaactttgctggagtatgcggagcaactcgaacgtgcgttcgtacaacagcagtgttggacattaaagacggacgaaatagtcgggatgtctgttgctttccaacttacttcaattttcaacatagtttgttaggattgctagcattttggagaaactcctctcttgcgctgtgattggtgacttcccaatatttctaggcgcctaatatttcaggctccattctaacccggtcaagtctggcagaatctcggcttggccaatttcgtccctcttaagatcaattatcagttcactctgcacttttgtctgactggctcggattgaatgagataaatctgacactaaaagactgtctcgtcgactttaaatcatcggtccattggctcatagactccctcggcggtgaacgccgaagtgcagtgcctaccaatccctgccgtccacgtttgggctcgattaggcaagaaatacacatattgctccttccataactctccgtacacccgagtcaccacaaatttggtaaacaacacgtcaatccctctcttatctatcatggcttcacccacagcagccgttgacaagttatttgtctgtcctggatgtcagagaggtggcttcaaaagcatgggtgctgtcaaggctcattttgagtctaagggccacaaactcgcttgcagtccatgcgacaaatcttttgggaatgtaacggcgttgctcaagcactcccagaagcatgaaaagcccctagatggttccgatctcaagtcggtcaagtcggccaaaccagcaccaaagagcacgaagcaacagaggttcccggatctgtctgagtcttttgttaaagctgcaaacccaccgcccaagatcacgaagcctaaaaggtcacaggatccttctgagcccttgtctgtcaaccctgcaaaatccattgcaaagaaaacaaagcctgagaagtcacaggaattgcttgcgtctttggctgccaaacctgcgaaacccattcccaaaaaaattaagtttgagaagtccctagatcggtctgaaataatgcccgccaagtctgcgaaaccagctcaaaagcacacatcaaaccaggcatcagtaggtgctccattaaggacagacgattttgaagacctatggaccaagacttctgaacccctgaacatctcatcgcctgccatccaaaatgccaattaccatgttttgctcgagccgctcgagcaaaatttgatctttcgctacttgtcggctcgatgtcactcggacacccgtctggtcacacgaggctttacctttcgggatagcttggcagatgtcagcaggcgcccgtcgaagaagccctctccaaagacaggacatttccgccaagttcctcgcccctccgacaacttgccgagaaggagagcaatcgttcttgactgtgagatggtgcaagtcgaagcagggcgtcgggagcttgcttttttaagcgcgattgactttttgactggcgaggttctcatcgacaactatgtacagccgaaatcgagagtggtgaattgggattctcggttcagtggggtgactcctagtgccatgaacaaagctgtcaggaaagggacagcgttgtttggctgggaagaagcgcgctcgaaattatgggagttcatggacagcgagactatcctcattggtcattctctcaacaatgatcttgacgtcttgggtatcattcactggaacattgtcgactcctctatcattaccagcgaagcggtgttttacactgtacacgccggtgaaccactcaaccgcacatggagtctgaagactctgaccaatgaattggtcaattatgatatccaagtcgggaaacagggccacagtgcgctagaggatgcacatgcaacacgggatattgtgatctggtgtctgagatacccagagcacctgaaggtatgggcggacaatgcccgggatcaagaggagcagcgcatgtacgagagggaattgaagaggacgaccgaggagcaggtcagggagcaaagaagacaacatgatatggagataaagatgcaactgttatctcaaggcgttggtggtttgggtcttcatggcattggcctctctgatgatgatgccaatgaccctgattcttctttcgtcgaccgtgatggtgacgttgaatacgaatcggtaactattgaagcggctgctgtttcattcttctgatactaccatgtctataagtatctgttaattatgatgttatatgataattcaattacaagtattcagccgtgcaatcattgcgctaatcgcccttgctctccttctcttataatattcgacaagggatatgccttcgcgatgcaaaattacaggagcgaatcctatccacaagtcgatgccactcaaattcaaaaggccatggcctcaaccaaccgcaacctcacagcctggatgcactgttatacacagtgacctctgcagtcatcgacaccgttcgtgtctccccagcaatactaagagaggtctgccatatgatcgagtgactcaacctggtattgaaagtgacaaaactaggctggatgctagccacaagactgagacgcttcccatcactcatcagaccatcgtgtccaagaacaagccgaagtaccctcccaatatcaacgggagtatcattcggcccagcaaaagttacaataggatccttgagctgctcaaacgctttctccagccccaaatgctgaacaaagacatgttcatcattaggaatggtataaaggctctcctcgctcggtttgagaacaatctccactttcgaaagaatactcatcttaaccgccgtaacctcgacccgttgcacaacatcccaaatcgcactactactcccgtcccgccgcggaataaccctgataagaagcggaatcggcgacgagttatcgagttgaatcgcaaccggcacacccatcacaacctcaaagctgaatccaggaacggaagacaacccaagaatcttctgcgtcttctgcgtcaaggataaccccacatcccgcatcgacggcagcagtcgctggctgcgcacccggctcacgatactgcaccgctgcagcgcaaaccggatcccgcccgcgtcgacgttcggatgggccagcgtgacgggcgctgtcgcgcgctgcacccgccacgacccattgcgcatataccgcagctgcgcctggagatagtactcgatgcagaccttcgccccgctccattcggtgtaaaacgttccgggtaacgggtgttgcgtgatgcagcttgcttctagggggacgaagctctcttcttgtgagtggtcgcgcactgctgagagcgaagctgcttcggggatattaattgagaaggggatgttgatccagtcggttggggtgctgggggagggtatgtggataggtccacgtaacagggtctgtgggggcaagtggaaaagcttccagttgccgtggcttgtggtttttgttgggtagccttctgttattaagcgggcttttgtacgcccgatcaatgtaagtgcgatcttggcgtctggggccacgaggtgcgagtggcggttcacgctgccgattattgtatcccctgcggcgtatgtccatattggaggcgccgcgatggatatattgaggttaggacctccggttgcctgggtgggatgcatggcttcatggtggagggggaaattctttgaaaggaatttcggtcaagccactagtttcttacataactcaggcagggggctaggctattagccaaaataaggccgttagctgtcacaaatatggaattgcgaattgtggagatgagctctgcaaggatagtatggggtagacgggtcaggcaaaggcaagcggggatgtcgagggaaactcccatagctcacattccgatacagtggctgtagggaaagaaataaaccctatgagttgaatcatatctctcttgctacatggtttttgcctgttaacctcgacctcgacctcgactttgtttgtgcacttccaaggttgccagccaggcccacttttagtcgtaactccagatgaactaaccaggtagttaacaactattaactaactaggtcagattaatgaactacatggacagaggcataagtcgagttttcttgtaacacctacatatgttgggaggcagacataatcgttcgaagcgatgcaccaattctccatcaactacacatacctctgaccatctatactacctacaacgattaagacaaaatactacaacatacggtgtacccaagcaaataccagaatcaaaatcaataaatccgggtatcaaattcgcactcgaaagtgcatacatacaacctcctctcgcagacaaagttcatacatacaagtacagttccaaggcaggtcgagaatcccaccagctcactataaagtagacaagacaagtcgaaagtctcgagtcgagcaggggggatcctcaatcagaccccgataacctacaagacacaataacaaaaaggatgcacgtcgaaataatttcgaggtcactgtgcgcccgctcagacgccgtgtaaaaataaaagccaaccaagacgccgcgtgcatcaacgatgcggaatgtgtatagtcgtagccaccagtgacggagataatatcagcatgtgaaggggtaaaagtaaagtaaaggtgcggtcgttccacgtattcccggtgtacacccatgtaccgagagtggagggtatcatgtagcgtgggataatatttcaaggtagggaggtgatgcagctttcgtgaagctgacaatgagatgtatcactcattggcctgctcgattctggcaggctgttgggagtcattatgacttccgggctctgcagagccatgaccgccaccatttgcaaactccgagaacggcggtgcggccgtcgtcctttcgctcggtgccgtccgggttacctaggaccatggagaagacccagaaaaatgcggctgtccatgcgaagaggaggatcacaatgctgagtaacggggataggagcagtacgaagattgaactagtcacggcatagacctcgctcggctcggatagcactgacggctggtctgaatctggctctgagcggatccattgggtcgattgggtcgatgacgatcggtcttccactgatggtggctgcaagcaaacgagccgttcgtggatgtggaggataggagaaaggagatcgcaaagttgtgatgcgaacgtcgttgcgcagaggtatggagaaaatgagcagaggcggaaaggtgaaacaaagagtgcgaagaggagggcgaatatagtgtatagagtagcgccgagtgagtagaatgggatgatagtgagacggaactgccaatttgtattagcatagaagtattagaccgctatattgcgcacgtaccagcattagaagagcatcctggccctcattggtgattatctcaacattcgaaatgggtcgttttcggacacgggttatgctcgggttggaaagttcccccgacattactgacggctggtctgcccagctgcttgtcgcccgctcttctttgtgtgcaccacttaatgtcgagccgccatcccgagcatctgagccgggccaggcagttcctcccagtgtctgagtatggtacacacggtgttgccgtgatccggaggtgcggggactggcatcgcggcttggtataggagaggaggttcgagattcgcctacagggtgacccaatacggaggactgttcttgggaatgacgggtagccggaggtggggtaacgatcgagctgcgagggtttggtccttgatcgtgatagtaggcgggactatatgacatctccggggaccgcatggcgggcgaggatataaaaggcaagaggtgaagacggagcaagagtcgtacaaggtagacgcacagagggcgactattgcatgtagaattcaccgcatggtttccgtaatcgtgatctttctggcataaggggctctcagtggacaagttggagggtgaagggggtgggcagagagggcggaagagagacttataagagagcacggagagccgcagcttgaaagagcggaaaagccaggaaaggccaggaaaggccgtgtcaggcagcggaagagcatttcctgctgtttgcaatccctctcgccaagacgcccagatgccgagcccttggcattgagttgagcacaataatcatttgtgggtatgctgctgatccttttatctcagatcccgatcatggctatattcggcctgttcgataacagggtagggttgtgttggacaagatgtgcagctgtcctaccatgagaccaaagatgctgagcggcctaggggtcaaaggatgaattacgacattttaccacctgccaagacgccaagccgccatcggggttgataagtcgactattcccggcctctgattggtcaaccgtggcgagatgatccgcgctgagacgagggctggagtcttggcggtaacagccgtacgcacgtgatgacatgtattgctcctattgcccaatgtatataatcctggcatcttccaatgtgacggagagatgttcacgttgtatgatatgtgatctactactcagagaagtgagctgagcagaacctcacagggctactatatacacgggtgcgtaccgccaaatcagggggtcaacacggtactccccaaagaggagacgcccagaggtcggcgggtgttggcattcgatttcggagaaatattctcagattcctcagtatctcttacctaactttccccaatgattgtcctgggtttgccaagggatagtattggccaatatagatactccgtacgggatacctatctgatatccttgccagacaggaagagtcttggaagtcttggctttctgaccctttcattccgctgctccgtcgagatgaatccgattatctcagcgaatcaacacatccgacgtccgcctcagatccagaatttgctttcccctcgatgaatttcagctcttggcttgtagggtttttctgtctggatgtctgggcactgtatacaaaaccgtattctctgcttggctgccccggtgagcggtcaagagtgactcattgcgcgttctgtgctcggcaaccctctgtcgagactgttggtttccctttatttacggctgcacgctgtccaaactcccttggctgtcagtctttaccaagaatcatgcgcctttcctcaaactcagcccatgagcaaccacacatctgccatcagccaagcacgcaaaggcatggcataacaatgacaggtggcgagtgcagatctatcatatccccgaaatccgggcgctgttctaaaccacctaacatgaggggtcgtggcctgctcgtgcgctggccatggatcaccgtcaaaaatgatcgactcttccatatctctcaaatctcacagatatccggtcgaccgatttttctatcattggtcgcatattccgctggaaaagacaggtaagatgttatatatgaagacactttcccccctcaacccctcgcagagctgagatcgttatctccaagcaaatctcttctgagcagctctctcggctattcatccacgagtcaccacccacgccccacggcatatatacgttcagcttccttccagagctttcctcacccatatggttgttttgcactgatgtttccagcatattgtccatatcgcaagctcatcgaacccacgatgaatcttcgccggcactgtcgaatcgcataatcattcagaacgtgagattcaggagcttggaaacaaattaccgaagctgtcactaaaattccgaacggcatctcgctattcttcgccaattttagcattacttacaaaggatttgtgcatgcttatgcgctcgatccttaatcttcggttccttgtactggcttacaaatggctcttttctggacctgcccgtggttcctttactccgtactgaatttctgcatctcaaccaaactgacgaaccccgagttgataaagtatatcctacgtcatagactctccatcatggctaagacgcgttcttggtgtccacggggaccctttctttgtgtacgttgtatggatttcatactatttgttccaccttggtattatcttgaatatatcttcaaacactctgcaaatgaggtttcctactccagacatccaagctacaggtggtcacgtgctcatccattgggaaggttggcttttaaacagttgaaagaaatatgaatttaagtgctttttcttttattgctgagatgtgtagtcctcgatcggaatgttgtataatcgccgcacagagaagtgattcaaattccgaattgaggactcgaattcatagcgaatatataatgccgatctgaggtttcgaatgcaacaagcgatccccaaaaactcctaattcaaaattgaagtagtttatatgttcaatagtctatactctagtaaccccactcacaaaaaataatccaggttcccccattcgtggctgacgggggcttgcagccacaagtgatcaagatgtgatgcaaccagccgactcagcccgcatcaatcactgcttggtcttattggctcaacggtacctgaaaggacccgggccgcgttgagggcttgccttggggtaatgcaactatgagaccatagacccgatcctttaaacctaacatcaaatgataagcatcctcccaggtcatcatacacgactagacttatatccctcgggcctcatcgccaacacatagcaacacagacatgttacccaacagaaagtacctgacacaagaagtatctgtgccccacgtcctggaacgcatctgcatcgagcccggttggaaatggcgcactcttaggccaaccttggaatctccccacgatccctatcttatcactgatcggggagggtagaaaatggacgcatctgttctggcgttttggtctttgtcgaggtcatacaaatcgaacatctgtctctcccaactagaccggtcttcaatccctgcactctggactatcaggtcttggcaagacatgacttgaaactttatgttttatttttttggctttgagttgccttgcttttttaatttcctcatacgatgtgactggcgatgggcgtgtgatattcactgcgaggtagagtgtggtctaccgttgaccgtgcagatacgccacgcccgagaagaactcaatttgaggatacgtatacaacagtttgtatggatttgcttgacggcgctctttcactggtcaactcggaagcgccagtgatttctattcctgtccattctagccttgttccctggcccacacacccccctgcctcgattctaactctggaatcgtgtcgcacggtcatacccaccgcctcggagcatggcgtctgcgaaatcccgtcgcagggggcgttggttcttactatttatttacggtctcaggatagaagtcatgggggtctccacagtggacacagcgatgggaccgcgatgcagaggcatgcgcgcggctgatctgtctctggtcgggccattactgtgatcccggcggtgcttttgcttgcttttgacatgcttccgagatttgcatttacagtgaaggtgttttttgaagattatatattctgcactgatcaaccaaagctcggcgagaataccgaatccaagatggtagaggttgagacagggaatgaaagagaaagaaaaagaaaaagaaaatatcaattactgcaagtcacaggttttgactcggtcggcaagtcgaaataacaagctgcgtaaccccagagatctctaggaaccatatacaaaagatagttcaaccgaggctgttttctccgtctcacaacccccaacggcaaagacggcggctcggctagcaaaccctgatggaaatgaggcgtacccacgcacaagtggagtccatcattgggagaaaataaggtacacacgttcttcaagccacgtatgttggatacctacgtaggtaggtcttgcaaatgtactttagatgagacaatggtcagcatatcagtacaccgcaagggccgcgacaacagaattccacagcgtcgtcgcggttgtcatatccgggagtctcccgaggtccactggaaaatgtgtaatcaagatcggcgcatccacaggcatgcaccagccacaagcacagggccatttttcctgtggctgacgaaaatttaaaatgaaataagctgtggatacacgctaagccgcttaaagcgggtacaataatgacggaaggggcgaatatgcaagtcaaggtaccctgcatggggactccaaacaaacccatgggctttgaagggggtgcgacttggattgtatacaatatactccggagaaaaatgggaaaaaaaggagaggggacacagggtcactcgacagctgcaccctgcacagttccgggtttggtctgtctgtgctggtcttgcaggccattgacgtagacggagtacggagtacatccggaggaattagctctatattccatggctagatacggacagatcgcataaagtacgaagaccgggacaaagaaaatcaagtcactaagaatgatccccggaggtagtctccgttctcatttgacgggggattaagtacggacagtctaaagtgctgggcaaaagggggggggaacaaggatctgagaaagccaatgcggctgcacggccctgtgggctacatagcaccacggagcacagtcgcactaacgcaccttagaggcaaccacggggggagtccccactcggcgccttttgccgggggtttgtgtgtttgtgttttgagagagattgggcattatgaattcattaaaaggggagagactatgagttagagtacatttctatacttctagaaactgcccatagaataaataaccataactcttcttatatgcttaattctctcatgagatcatgggtgggttttgaccaagaaaggaaaaaagaaaaaaaagaaaaagccaaaaaaggagaaaagaaaattcaaaaaacccaaaacgggccagaaaataataaaaaagaaaaaaagaaaaccagcataaccgcctccagatctttctccacaacgctaagccgttcctgagtgtcagcttggcttatataatccgtcgtgacggtcggagctacccaaccactagcgtctcttggcgaatttcacctttcctgccagcccctcgactcttccctctctcttccccccttaggcattcggatcatcttcaatactgacttcccctttccccactgtatcgccttgtatcttcgcctctttcttcaatcctttatttttgctcgtctaccctcgcgcaccaagctcgacatagctgtgacctaacccgctgccccgagattgtgtcactgccatatcgcgccactcatatatcgtcgggacagcgccaaggtctagtcgattttggaaaactgccgccattcacggcttgatagtgtcgcgtgagggaccgtgacttctttcgcgacccgttgtttttttttttttaccttgttcctagtcgatcggaaattgcgcctccggattggcgtgcgatatcacacgagcacacttgatcggtgtctaatagtggtgtgaacttggattgcatcatcgtgtcgcaaacctaccccgagagttcggtcgcgacacggttcaactcaaaccatattcacgattctcgggaaccatgtctcatactcaaccatcgcccaccacgggcgtggctcctcaccatgccgcagcgcatctcgctcatgcgcaagcgcaggcgcaggccaatggtcatatgtccgcaattcccgtgcaaggtcaaaagggagtccctactctcaccaccgcgcaaaagatcgccacactcaatgaacaagtctggcttcaaataggtaaatattcccgatcctcataatttggcgaatcctgacagcctcgtttgtaggaagcttgaccgaattgatgggcgatctggagggtgcgatgaatgcctacgagcaggctctgcgtcacaaccagtggtctatctcagcgatgaatgccatttcatgcattctccggacaaaggagcagtttccaaaagcaattgagtacttgcaaaatattttgaagttggatccgagcaatggcgagacttggggcagcctgggccactgccatcttatgatggataatttacaagaggcatacacctcttaccagcaagccctttaccacttgcgtgaccccaaagtaagccgttttcccttaacattttccctcgaatatttctctgattcaattctctcattaggaacccaagctgtggtatggaatcggtatattgtatgatcgctatggctctctggatcacgcggaagaggctttctcgcaagtgatgcgcatggcacctgatttcgaaaaggctaatgagatctacttccgcctgggaatcatatacaagcagcagcagaagtttaatcagagtttggaggtatgtgaaatctcttcatatgagcgagagctgtcactaactcatcctagtgcttcaaatacattgttagcgatcctccacgccctctgaccgaagaagacatctggttccagattggccatgtccacgagcaacagaaagacgtaagtcatgcttccctacactcttgattaccttgtactcattcaatcctcagtttgaatctgcccaatccgcgtaccagcgcgtcctggagcgagatccaaaccacgccaaggttctccagcaacttggttggctctatcaccagcagagtaatgctttccaaagccaggagaaggccattcagttcctggaaaagtcggtcaatgctggtaagtcacaatccccaggactatatacattgaaactaattcatcctttccctagataacaatgacgctcaaagctggtatctccttggtcgttgctacatgtccatggcgaaataccccaaggcgtatgaagcctatcagcaagcggtctatcgcgacggccgcaaccctaccttctggtgctcgattggtgttctttactaccagatcaaccaatatcgcgatgccctcgatgcttactctcgtgcgatccgcctgaacccttacatttcagaggtctggtatgacctgggcactttgtacgaatcatgcaacaaccagattgccgatgctctggatgcctacggacgcgccgcagatcttgacccgagcaacgttcacatcaaggctcgtctgcagcttcttcaaagccagttgtctgctggcacggctggacaacagccaccctctgcccccgcgcctcagccgcaggatgttcatcctcaggcttatcaggcacctggcgttggtgcacctccagctcctcagtggggtgcaccagcccccatcggtccccctccacaagctcctgcacccccgagacagattcctgactggaaccgtgggatcaacgagcttcagtctcaaaatcaagctcccccatctaacggccttgaccagcgcgacgctcggatccccggtgctcccgctcaaagccctcgacaggagcctggtcggtcgttcccggatccccgtggcgcgcctcgctcgccaaagatgggtgatcccaactcctacccgccgcctcacactctaccccagcttggaaatgcgcctggtccaagccacgaacgcgctcctagtggcagcaatgcctttggtgctccgcgtggtgctctgccgagtggcctgcccgtcgctcctcctggtccccctggacctcctggacccaatggcggtgctcctccccctccttaccagaaccgccctttcagtcctgctcctgagattcgccctattcgcgaggagcgtccctcttcgccaggttcaggataccccctccaacagttccaccccggtcctaccctccccccacaagttccaggtggtaactccatcgcctctggtgccccggcccctgcttcggctgccactgctgctgaggctgccgcccgtgatcgcgaagatcgccccgcatctgcaatgaagcgcggccgcgaatgggaagctgatgctggcccagtcaagaagcatgcaaatgaagagagccgggctcgtctggatgaccagaataaccgccgcccgagcccacccgctcgtttgccttctcctggtgagatgcaacgacgaagctcctcagaggcccgccgcgaggacgcccgtcgtgccaatgagaactatcacccctcagaagctgctcaccaccctcctactctgccttcgatccaagacatgcctccccgtccttctgctggccccagtcttcccccgatggccgagagctctgcacctgcacctaacgctccccccactggacctccttccgccaacaccccggtcaaggaagaagctcctcgtcctgaggctccccctgcacacgagccccccgcgcgtaagatggatgtcgatgaagactacgatgatgaagttgaggaagagaagaaggctgctgcttctaagggcagccccaacggcagcactgctggcaaccccgccaatggtgctggaaatgcccgtgccagtactccatccaagatcgagcctacggcataaaaatgattcctctcccaaccagactagtgtctggctaatcctggcaaagccgattccttgcttctcccttcctatctttcagtgtgtgatgtacggtatgaatgtgcgagttacgctgactgcgtagtttcaagcgcgtgcgctgaatactcatgtctgttcgttctcttcttatgatttcttagtctcctttcactgtgaatttttaatggtgcattaggcacccttgaagcaaaacatttgtttgatactctgaaatttggtagagtaaattcataatgtctcctttttttccctctgtaaggtccatatctcattccagcccacaatgtggatgtcctaaaaccatattttgctggccgtttgccttggcagcaggaagacccataaaactcgtgggcccggaaaatctggacagcacgtgactggaccagggctggattagataatttgggttattgtggggtgcctcaggctcagatccgccaagagtctcgcttaggttagcccacacaccaagcgtgcaaaatcaacttcgacatttccagatcgtcctcccaccacctcgacgactaacgataacagggtcaagatgtgagtctctcccgattgaagattcctatacaatcgccattgaatacaattgctgacctgctttcgtctttcaggagtcaccggaagttcgaagcgcctcgtcacggttcgtgatcacctttttcctcgatatcgaaatttcgaaatacggccactgtgtgtgtacagtatactgattatatctccaggctccctcgcctacctgccgcgcaagcgcgctgcccgtcaccgtggtaaggttaagaggtcagtactctggaagaatttgtgatttgtggatttgtgtgctgagactttttgcgacagcttccccaaggatgacgccaagaagcccgtccaccttactgcctccatgggctacaaggctggtatgaccaccgtcgtccgtgaccttgaccgtcctggtgccaagatgcacaagaaggagattgtcgaggccgtcaccgtcatcgagacccctcctgtacgttttccccgttgtgtgcgaaagtgaaggagacacaaaaaagaagggaccggaacctaatatctttttttccagctcgttgccgtcggtgtcgtcggttacatcgagactccccgtggtctccgctctctcaccaccgtctgggctgagcacctcagcgatgaggtcaagcgtcgcttctacaagaactggtacaagtccaagaagaaggccttcaccaagtacgccaagtcccacgccgagagctccggtgcctccatcacccgcgagcttgagcgcatccagaagtactgcactgtcgtccgtgtgctcgcccacactcagattcgtcagactcctatcaagcagaagaaggcccaccttatggagatccaggtcaacggtggctccgtcgccgacaaggtcgaattcgcccgcaacctcttcgagaagaccatcgacatcgactccgtcttcgagaaggacgaggtgattgatgtcatcgccgtcaccaagggtcacggtttctccggtgttacttcccgttggggaaccaccaagctgccccgcaagactcacaagggtctgcgcaaggtcgcctgtattggtgcttggcaccctaaccacgtccagtggactgtggcccgtgccggtcaggacggttaccaccaccgtacctcttgcaaccacaagatcttccgcattggaaagggtaccgatgaggctaacgcctccactgagttcgacatctccaagaagcagatcaccccgtatgttcccccctgatattttctgtgtgttttttaattctaacatttctctagtatgggtggtttcgtccactacggtgaggtcaagaacgacttcgtcatggtcaagggctccgttcccggtgtcaagaagcgtgttatgactctgcgcaagactctgtacccccagacttcccgccgggccaccgagaaggtcgagctcaagtggatcgacacctcttccaagttcggtcacggtgctttccagaccttcgaggagaagaaggccttcatgggtaccctcaagaaggaccttgtggagactgtttaagatgtttaagcctatggttggcggtagtgcgacgtttcatattcaataaaaaagcgaatatccttcacgatttgcatgtagatgtatactgtctagatttataaattcattccagtgtatggagaattctccttcaatgatatatttcttaaatcgatattttccgttgcttgatatatatctggttgggatgttgtacgcagccgaaatgttcagctggtcttttctttcccttccatatatctatcttgattacatcccctaaaattatcctcactctctttactcctcccaatataccatactccaatccgacaagcgggtggtgaacaaaatgcgccagtccaagattcattgcgtcatcccacacctttccctgccagccccgacaagaaaacgggctttgccaatctcatcctacactctacgatcaaccttccaaagagaacatccacaacaccaataccgtcttctacatcatctatataaccaaaccagcctaagaacccaccccacaaacgcagcgcaccaaacccgcttcttccccgcaacctcaagaccgcacccacaaaccagctcttcccccaccaagtcccccttctcaacctcaacacaagccatgtcctccgacgacgcctacatgtccttcctggacaaagcgaacgcagatgtgagcggcagcgccccacagcaagggaccggcaccgtcaaaaccgagaccgtgcacagctccctgtcagtgccaaaggcgctccagtccgtcgacacatactacatctcagatacagacgagcccttcgagcctgtggcattgaagtgggatggtgccgccaagggagcgtggcctagtgctggtatgttcctgatcctgatcctccttcatgaacttactcccttgaaaacctgagacaaaatctacaaccaccctgctaaccaccctccctcactgcagaccagctctcctccctgatctccccagacaccgacctgtcccagtccatctccattctatccccctcctccttcgacccaaaaaatcagtactctgccgctctagatgctgtccgcgccgcggctgtcgagaaggattctggtgcagataagtcagccgttgagctgaaggtctatcgtgttgaacaaactagtaccaagatcgagtactgggttctggcactacatgcgcctgagagccgtcttgtcggtttgcgcgccaaggctgttgagtcgtaggtgtccagactatatccataatgagaggtcttggggtcagtataagacataatattggttttgctatttgtctattctaccgaaatatgatatttttatgagaaagatcggtacggatttcgtgctgccttgttttttcgatatagaagcactggcgcggaatggataaacagggacctcatcctactttgcccttggtataagttggccctgacaggtttttgttcgggatttgtcgcattcttaagccccggggttggggtttgaggacgcgtgtcaatggctgtggaaacaagttgaattggattggtcaattaatgttgaaaggaacaacactggtaactagtcttgtacgtcgctgtttgtgttcaaaggaatcatatgtagatttatctagttgtatgttgtatatcgcgctggtagccggggtctcgggccatgtctctcatcttcctcgccgattcgccctttgcttcaacaacaccccgtgcatctatcggagcaactttaactgccattattactgtatttggacctctccaggttcatgaccgtggtgatccccgaattccagctagcattcatgccgggccattccttgggccctggggagcaacggaaatgccgcaccctagaatagccctacctagggcatgggagctaggatagggcttcagaccatcagcctatttcaatcaatcgaagcagacagtcaatgatataacgaagatgtcttgagctatcaaactgagtcttgaatagtatctactatcatccacggtccatcccaaaggctcgggaaaagagaggcataggcataccactggttgcccccttggacctctgtcattcctgtctcctcgtgagcccaaacaagacccctcgggccatctaggctcttcttttcttctgtgtttttggccttctttctccgttcagactctgtctcttttatcgtcgccgagggaaattcgatgctatccgacctgcgttcgttctttcgctaaaatattgcactcgtcgactgtgcaatataccagctttggtcttcagtctttaccgttgaaataattaggaaatcgctgggtgacgaatcggaagaaagaagaagcagaacatcacacccatctgctctgcaaatcccaccaacgactgatacaaaagggctgttctcgcggcggaattgaaggcacagcaaggcctcaccagtacagagcagagagtcgtgtcggacttacccaggaaacttgaaaatcgatcaaatgtcggaccacggctctgatacctcagaggggaaggcgatgcctcacatccgactcaactccgggcggcaggatcctttcctcgagtcaaatgaaggctatgcgcctctcacatcgcggacatttccccggcccttgacaccacagggagccgaagcgcctatgccggtgagccctcaagcgatatcaccatacggcgtatcagctgcccccgagtcctcggaattcctgctgcccccgaagttgaggcctacacagggacatggtctgactgacactgaccggaaccggtctccggatcggtggtctacggctcgctcgagtatcagctccatgagccgcgagagcactttccactttgatccgttccaggactcgagggcgccttcgcacgctggtagtgaggattatgatgtcaacacgcagactgtgtccgggaagttcaatatcatgcccactgatggattgttgttgtaccccgaggacgtggagaaggatgactacttgcacaacccggacccggcggacaaggatcgtgattgtgacatctggaatcgacggggtattttgaatgtcggtggtctggtggttttcacaataggtcttctggtgcttttcattggctacccgctcatgtaagaagttgctggcttatctgactgtctctccatggctaacagtaattgcagaacttggttggcgggctttgggaaacatccccatgaaggtatatgccaccctgaagacacgttgtgtttggatgttggagagcgaccattgttgggaaacctgcgccagagcttgattgatccagacacaccgaaagaggcatacaccaagaaaagcgccaatggaaaggagatgaagctagtagtgagttatttcataggtcgacaatgagaagtggctgacgttccattgtagttctccgacgagttcaacatgcccggtcgaacgttcttcgaggacgatgacccattcttccaagcagtggatttatggtacggagtgacacaggacaaagaggttagtataaaccatgtcacaaatcatcgctcaatcgctgacattgcctagtggtatgatcccgacgcagtaaccacagcagaaggcacccttcagcttcgattcgatcacttcaaaaaccacaatctcgagtatcgatccggtatggtacaaagctggaacaagttgtgcttcaagggaggccgtctcgaagccagcatgtccctcccgggcgatggacatatccaagggttctggcctggcttctgggcaatgggtaatctggctcgtcctggctatgctgctaccaccgatggtatgtggccgtacagctaccatgacggctgcgatgcaggcatcaccccaaaccagagttcacttgatggtattaactggctgcccggtatgcggttgcccggatgtgcctgtcccggctctgatcacccgactcctggtgttgcacgcagtgctcctgaaattgatgtgattgaaggcagcactgctccgctgtatggtgacagcggtccgttcgtcggtagtgcatcgcagagtttgcagaccgcaccatttgacctgtggtatctgcctgactatggtgagttttttttttatcttctccctatggaagacatccattaaccaaaaaactcagacttcgccgctgtttatgactcacgcgtcacccaaattaactcctaccgtggcggtgtctaccaacaggccatgtccggcctaactaacctgaatcaccgctggtacaacggcaccgaattccaaacctactccttcgagtacatacccggcgcagaaggagaggtgacttggttcgtcggcgccgagaaaacctggacattggacgctcgcgccatcggacccaacggcaatgtcgggcagcgcatgatcccactcgaacccatggcgctgatcatgaacatgggtatggcggataacttcgcgccgcagaacaagagcatcattgattttatgcccgccatcctgcgcttcgactacgtccggatctatcaggaccccgatgatgagagcgttacctgtgacccgccggggtatgagacgactaagtatattgagaaacatcgcaaggcatatgataatgcgaactttacgacttggtatgtttatcgctggtttttctcatttgcattttactaatgattgaactttagggacgaggctgggtacaattggcctaaaaattcatacatgcacgactgtccggctaattagattctatcatttgttgtctctttctatcctaaactgttagtcgttttagcggcattgtttgctggcgttattggggttgggcatcacattatattactttcgccattcatcatcaaccatttgattctcactctttcttcgtagagctcatctagtcttctctcacctcaactccaaccgtatgacgtaatgataaacttgatatctactaagcctagttagggggttcaacttcgcccattgtacaagctcaccgcctgctggatctggccacagtacggacacgccaagagggcacgatatctcaacacgttgaatcgttataacttgccttctatctgcagtgccgtgaatatgtatctttgaacttcattcttgaggtagaattgattcctgtcaaccaacccctcttccggaggtgaccagtctctgcccttacggccaatatctctttctcatccactgacactagctatagaaatccggggtcatacaataggatatacatgaaattatctgccattcatagatgtgaagcacattccacagaagaggccttttattactcctattttcaccagtcattggttgcaccccacacatcaacttaaaccccccctctcgatcacttgcccccgacttatatcccatatccacatcttcaccatgtccggcggacccataaatctcatctcagacacagaatctgaatcagactccgatggcggcatgcaactcgacgacctaaaccgcgccgacggcataccaatgcacaacaacggcgaaggtctcgaactcagaaacgtggacggcataccaatgtcccgccctggatcaagcgatgatgcttggaacgtgaatggaactacatctggatcggacacgggtatgtcttccaagttccaccatctcatctctatccatctccccgaaccaagtgaatcatagtccagtatacaaactaacaccgcgaaaaggaggattccgcgaccgcgccccgaaccccctcacggcatcatacaatcgcgccggccaaggcggcacggagtctcaaaccgccttcgagaaagacgctcgcacacgcccgcatctccgcgacgagaaacacgccgcgctggccgtcctcatggacaatgagttgttgattacgtatgcgctttcctcgagagaagtacgtttaccaccctgtcctgtccgatcccagccactatcactattacaagtacaagtaaattaaactaacaaaaccagacaatcccccaaacccgccgacgcttcctagcaagatatctcgcgcccaacgacccggacaaagcagaagaactgtacaacccgcgcttctacatcgcgcctgacgggaagggcggggagggatcgcttattcgtggtcggtaccgggagattattggggatattgatgatcataactggcataagccggggcatttgaggaccttggatgcgaaaaagacggatgctaagagtaagaagagcaagagtggttcgcggtctgtttcggtggggtctttttccggtgcgaattcgccgagggtttctgggggtggggatgaggagaatctatgagttatgaatatatgtttcttggtcttcaaggctacatagactacagactactaatgacagatgataatataatgttatattcgctaaaacacattagaataaactactatacagagaagcagatcaacgacagggccaccaacccagagaaagaagaagagaacaaaaataaagataaaaggggtatcatcgaggggatccaaaaagagaagacatatgtagcttctctgttctttttgtgttctctcctccttcgatctctgggatattacccgaagactcaggcaacgcggtagcactgcagtccgacttgcgaactcatctttgcattcttgatggaacagctgagctggtcacagatgccatccgagtcggagaaaaggaagatgagatataagggtaaccaatcagaagacagggtagatgccaaggcttacatctctttctcctctctcctccgttgctccgagtggaacagactctcgatgtctccaacctgcttacgctccgagacttctcggttgagcatgcgagaataatgggcctgggcattcatcagtgtcagtcctcgagacggtacgggatcgtattccgggtcattgtaaaaaggttgcaggcggtgcgaggtggtgatccggatccgaccgtctctcatgacaggtgattgtcattgcaaaggctctgagcttgaagagaggcggttgagatggaggtagacatcggtcccgtagctggagatcaattagcaagggatcggacagtttaagcagagaataacatacccctccatactgatcaacttcaaatcaccgccaaagtaccgagcgtatagtcggcttactggtaggccatatccaaatccagccatgggtgctttgaagtcgttcttgtcgaaatcagggtccaggttgggcgtttgctccactgtcgtgtacatgtaggtccatacgagggggatcgacgaccgggggataccaccgccctcatcggagatcttgatcgtaatgtcctctttgccttcggctactattaccttggtcacggggaattcatccttatcggccccatgtgcttcaacgaccgcccggagcgagttcttgagggtctcaaagagcatgtgcgataggtgtccgggaacatacataaagttcaagtcctccttgcagaccagctgcaccttgggcgactcgaaaagaccgtagtaatcctcgcagacgaagcgggcgttttcaatggcctcgagcgcgatgtcgcgaacgttggtcttagtacaaattattccgacataattggggtgtttgacatgcgtttgttccgtgagtgcgatgtgttggccgataagcattcgtataccgatccttgacatgtaaaaccggtcgaggaaggactgaatcgtggagtcgatctgcatgcgctgacgcgcacgtttccattctaggataccttgcgcgacggtggtcacaaccccgtcgtggcgtcgtttgatctgttgaagggtcttggcgaatcgttggttgtagtcgttgagttccggaggccagtttccgcggtcgtcggaggggaagaagtaccgtcggcctgaggcggcgggtgacctagcaacaccatttccgttggatgcagtcacggatgaccggtactgtccttcacgcacgctggggttttgggttgtttcagagaggatttttgacgggccgttcatccggccgggtcgcaacaggcgtgctttcacttcctgagtcagagtggggcggggaagagcaatgatttcctgatcgggtcagtatatggatccgggatcattattaattggtgagtcacatacctcgaatgattgcgcataccagtcctggacctttttgatcgagggcatctcgctaagtccatctggaagctcacccagatcttgcacgcgatgtgcgagacggatcgggagctcctcagacaggaattgagaggcgcggaatagggtacctggatgagagttagttatgtaactgtagatagcgcagacccgttcatagttcatacctgttgagggacggtccccaaactggaccatctgtctcagcgagacaccggttgcggggaagctggcataatgtctgatggtgtccatcagcctttccgagggcttccacatggtggtgatatattggccgaatggccttggaattgtgttttctagaaagtgatctatccagagagaagttgtcgaggaggaagtgtgagtgaatcgagtcatcggttttcactgccgaggttgaccggtccccgggttttctccgcctctccgcttgcgctctccggggaccggaggaagatcacacgacaggaataagcaacgtatgatttgtatcttaggaatgctggcggactgattttttgctgggttttctgtttttctacttcttttttatattaaaaactacattcacaaaggagaagtgttatattggagagactatgcgattctgaaagtccgttcacccgtggtctatgacataattgtgtggcctcaggcaggaatcacatgttagatatcagctgatctgatgttggggatgtcggggatgatatccataccactcatgtctttctttctagctattaacaaactaatggtaccttaaacacaatatgaatcacaatcattccaattatcaggtctgcattgattttattaatggcattcatggcttattgaagagaacgttcggtctaccagtatgtgcctgaagatagaatgagtcataaacatactaaagaggctcactaggtaaataccctggttgaaccaattgcgtatgatcctaagtgcccctttaaatacaataactttgtgtatcgcgtctctctgccgtctccactcgacaaagagaatggtgcctggcacaagcccggttgtgtggctattccttccggcgttagtgatctgatccttcgtctgacaaactctgatgctacatctatgggagcagcgaatcgtgtcgagaatgaggttgctatgatgactctagccgctgctgcgctagacccaaatttcgagccccgcgttgtgcctcgcctgtatggctgggctggaatcacatctaaaaaaggggagccacagcaaggttggatcctacaggagctcatgccaggcgttcccctagacgaaaggctagataacatggaactcgaggagaagaaagaaatatttgcacagatcgcaaagctccttaaaggccttcaggacttcccgctacccgcctctattactaaatttggaggacttacatttgataacgagaacaacataatcagtgcaccaatgaccaccaccagtactggtccctggccctcgtacgaggctgcatttgaagcacggcttaagcaagctccgaagaaaaccgacgagaatccttatatccagggctggcatgagaatggcgtccccggttggaggcctttatagagcgagggctcccggaatctttcaagcaacttgaatcgcacaacgacaaggcaataatccacgcagtttttagtaagcatatttcccttgcacctcccgaaccctacccgcttgttcttatagatgttttctatcagcacccaacaatctgtgattcaacatttcctcaggtcgcatcacaggattaattgactacgacttttcgtgcgttctccatccttcatacgagttcctttgctcctttagtggggttgggggcaagtttgggggctggccttgaggcccgtgaagaaagggccctcaaggaagccaagttacacggcttcccagaccctcttcccgatgaccagcaaggtagcgaggaagtacagtggaaagttgccaaggtttgggaagacgcccttcagaacgagggttgcaagcgcccgataacaacctcagggattgacattgtcgccgatgtcgatgccctgcttagttctatcctgccctggcgcgtgacaaattcagacattctgaggaggcaaacttgtcaagtcattcaaaactgccgaaatgagaacgagaaagtcctgattgagattctggagcatatagggttctagaattattagcagaactctttcgggtccgatttaagccagcgattcacttcgagcctcgccaagctgttgatgtttcatttgaattctgatctatccagttggtatattcaatagcaaggcttatgatataattaaggaatagcatatgtacttagggtaccggacatcacctacagaagttactctataaccaatgaacacgtgactgtgactccgactttgggaagtatacgccgtaggaaacgaaggatatacaaggacactcgttcatgtgcttggtttagtttttcgtcaatcatacattgttacttgcgtttacctttttactgatgacttccttattacttaaacacggaggactcggttatatcatgcataatctcacgtacttttgtcaaccctgtcctctcgcccccttttagcccttccatggccatcgctaagaaaatgaccagccccgcggctatctcgcattggcgcaatcactggtcttctcgaagaacactccgttcatatcccatccttgatagagaagaaaagagagggaaaagtcatcggatgatgcaacgggccacgttcccaccgctacccattcgcccgtccaacagatccgctttctggacactcaagattctcttttcgagctcttgctgttgtcgagcgattattatctctgactggctattatttagcccctcctacccttttttgtgtgtgcgttggcgaaaaaaaaatcccaatatccccgaaaagaaaaaaaaaaaatacaatcaattctggccctaaaaaattatctcaaatctccaaaacctcaaaatcttcatctcctcaattccattgacaacccgtgcatcggtgcctcgaatgttgaaccctctcccggcctatacatagggaggaaaaccgtccctccgaaaagcgatagatatataccctccggaatccacaatccacacaaatgtctcgccgtcgaatatcgcacagcgaaatgaatgaggctctcgcctatcccttcatgcagtccaacggcccatacaacagtcagtcgaatggacaaccccgtcgaggccccatcgaaggtcccaatggccgtcgcctcatccgtcgcgtcacatggcgctcctccacatacaagctcatggccaccctgtgggtgctggccgtcctctacatcgtctggctagtccgcgacctcttcttaccgtccaccccgtccgaatccagaccaacccctcctgctcaacccgaacaaaattaaaggcgctgtgtgtgggcccccctgggagggggcgagaattgcgtcttggattgggtcgtttctgctgccggagtggggggggttgttttgggggcccattgcgggcttttgagcgacatgtcgggctttctttttggcattcccgtatattattcgggtcccgaggagttagacttggagagctcttgggcagggatgcattgcgcttgagggatcatgctttttttttttgttttggttccgggagagatggcgctgaagatacgtccacattgctggcttgtgtggtatccggagattctccgggctaaacctactggtaatggcgctgttggggtagttccggatggagccctggagtgttctgcttgtcatatgcgggagtcgactagtagctctctccttttggacttctaccgactatatctgcggtccggcgctcaattgacccaaacagctttcttttttcttttcgtttgcatgtcagcgttctattgcatatgggtatgattaccatacaggccgatagcctgatcgagcatttccgtcttctttcttattctcttattcatgggcggttcaattgtcttttttttttccccatacagcaaaagcgttgatcattttctcattctagaatgtctgttacatcctcttcccgctctgacgtccatgacactccccaaattgacccctcccctatctcaacccctcgaagatttggagcgcggggcatcggggaagcagggaagtggggggggaaatttccctctgagagatatccacaagtggaacataatgccttgcattcaatttgtatacacagtgactcccttctctttcacctataggaaatcccatatctcccatcgtctttttatatataacttttcactttctaacagatacacagaatacgactgtactaagggtaccttaaacgaacagggaagaggtctcgcccttggcaatggtgctcgcgtagggcttgatggccgcagccacctcggtgctggtgaacttctcgacctgctgaggtgcgcggccgacgaaggtggtggcgtcgagaagggtgtccagctccgggatgatgggggtgaagaacgcgttgcggcggatgcgctcgatgaggtcgttgtccttgccctgcttcttgacgttgtcggcagcttcgcgggagagaacacctgcgtacgttagaattccggtttggagaggaagatacggagagaaacttacggatctcctcgtgcgcgtcctggcgggagagacccttggcgacacaggccatgatgatgttctcgctgagatatgtgttagcaacatccattggattcgttaaagatgtactcacgttgccataaaggggagctcgtcgttgacgtggcgcttgatgacctcggggtagacgacgaagccggaggaaacgttgtctaatagtggtcagccataatccgagcttctaacaactccgaaactcactcaggaggatgagacaggcgtcagcagtcaggtacagctccgggagactgatacggcggatagcactgtcatcctagtacaaagttaataaatgattctagacacatccgcggtatactcacaagagatcgctcaaaccactgagcggagtaggtgtccaagcagtccttgggaaggttctgcaggtgacgtccgagcgagcacagacgctccgagcgcatggggttgcgcttgtaggcctacaaataatcagctaaaggacccaacacaacagacaaacaaactcaccatggcactgctgccgatctggtccttctcgaaaggctcctcaacctccttgagcatggcaaggtgacggatgtcaatgccaatgcgctcacaggtggaaccgaaagaaccaagagcgttggcgacatcaacatcgatcttacgcgagtatgtctggctggagatgatgaaagcggagctgaagccagccttctcggtaacaagctcgtccaggctctcaaccttggcgtggtcaccgtggaagatctgcaggaaagacgcctgagtaccggtggtacccttgacaccacggaagcgcaggtcattgcgggcacgctcaaggttgcgcagatccatcagcagatcctggatccagagacaagcacgcttgccaacggtcaccagttgggcgggctgaccgtgagtgaagcccagacaagggaggtccttgtactgctgagcgaactgggacagcttgtcgacgacaacagccagcttggggatgaggatgtcgagaccgtcgcggagcaggatcagatcggcgttgtcggtacagtagcacgaggtagcaccccagtgaatgataccagcggcggcgggggcaaccaggccaaaggcatggacgtgggccatgacatcgtgtctccggcgcttctcctcctcggcggcaacggcgaactcgtcatcctggataacctcgtgggccttcatctgctcgatagcctcggtggtgataggaagtccaagctctgtagccaaaattcagtcaattgatgtgtttcatcaactacctctgatcttcgacactcccgtaccttgttgggcctctgcgagccaggtccaaagctgtctccacgtggagaagcgcttccggggggagaagaggtacttcatctcattgcctaatcaattgagtatggttaatcccgatttgtacaatttccggggttgcccctcctatagaggggcagttgggaccgacttactcgcataacgcgagttgaggggggtctggtagacatcgttgcttccggacattgtgtcggtggttgtttgagatactcaaacgaagaattgagcaacgagacggacgataagacagggacaaggcgatgtgcgggcaaggaattttgcttgcggcccggttttagcggggcttatcagtcacgttatcgtatgatctacatgtcacatgatatcatacgttctatgggatgttttgttgatctaccagtagggaaagcaggcttggtggtgcatacattattatgatattagctcgtatagatggagtcctttgtgtgatttcactctccgctccagataatcaagccaactgcgccagctgtaccgataggcttgccttgtcgtacttgatgtatttaccgcggcctttgtcgatctcaacatatcgatcgtaaaagcgcgcatacaagggctcgagaacagtttgcagctcacgagttagtaaagagcgcacctcacgctccatgtgaagggttttgtgccgagacaccatatcctcgaagctcgcgttgaatgctttgaacttgtccttgatcgcatccttatccttggatgacagggacttgacgatggcgcttgaatccacgttgccgctagaattgcgctgcgccccgcgggaggtatactgcacatcaagaaggtactgggatgtttccttccatgcatccagataggtagacgtcgcgcgcttgcggaaagtgtcgatccgggcaatactgtcggggttacccaaataacgtgccagttctgggctctgtcggatcgaccggtcgaccacgcagaacacgttggacaagaacacaccaagcgctgccttcgatcgatggaaagcccgacctcgaccttccagggaggtcatcaaggcctcgatcatatctagaatgaaatgcgacagaagtgtgctgctgtctggacctacatctagaggagccgagccagcggtgttggacttggcacgccagtttccatctcccagagacgtcaagatagaagccaaagggcccgagtaccccgtcagtgtggccaatgagctcatcacttcttccacaagaggcaccgatccaccgtccggagggagcgtggtattagcagccttgcgcttcgtttcctcgagcaattcggaaagagacgacttggcagtctcgcgtacaggtcgaagagcctcgatcaagaggctcttcagttccgcggccttggagtcaatccgataggacatcgcggtcacaatttcgatgatctcaaaagccaagaagcagtctgtcatcagattggtcttgatatactgattgagctcacgaagtgttttagagtattcgcccatagccgggaagaacgtagcctgcaacgctaggccctgctgatctccagtaaacatctccacaataataccgtgctcggtagttataaaggcctccagcgcattcgagtaaataccaataccattggtaccctgcttgtatgggccatcggtgggtcgccgtttgacggtattgagggatgcaatggcaagattctccaagctggatgcaatgtatggtccccgtacttccgcataagccttcagcgcggggttgtcccccttcccgcgctgagatccatgaacggatgccgagccgactgccgaacacaagggcgccatgtgggtgacggtatcttcgggtatggatgggaaggggagatctagaaccgtcgcacattagatctgatttaggtttcgtttggtcgtgatacgcgtacctttggtcaaatagtgtaggggctcgaccggagtggaatgctggctcagttccccccgtagcacttcttggagtttggtgcttccggtgtttagaagagagttgaagtcggcgatcgcattctggtttgatcgcaagtttgttgtgttaaggtcgaccagcgccttttcaacacgtttcatcgcccctaggtagtgggtgaggccggagctctgtggtctgggagacgatcagcaaaagactcagactatatgctcaaagagattagaagacacataccctgcgcgaatgattccatcttctcggttctttgcatcgagaggctggcgcaggcgatcgatggcgtcgttgaccttgtcgatattactgttggtgatttgaagggattgggtgttgctatagatgggaccaatggcttctttgacaacttttcctcctgtctccaggcgtaccatggagccttgtatcttcttcgtgagtcggttgagcttctcgaggttggcatataggacctcgacctccgcgctctcctccgcgtaggcggtattccttggcgccaccatggttaattggaaaattaggcaaaatcaatccagagagaccatatcacatgtcaccaggacccctcatgtccttcgcgggcaaacggaattgatcgatcaaatggactgattgtccctccagctccatccagtccagtgataaggagctccgccacgctagtccaaaagaagtcaggcccagtccggccttgtcacgtgaatccacgacgtcatcaacccagggcttgttcacaggtagcttgcaagaaaaggcaggcggggcttttgcagtccttcaatggaccccctggatgcagcaggtctcgtactttgccctaaccttcccgttcacaatgggcactgcaaggaccactcgtctgtggacggtgccccctgctgccctagctgcatacactgcgggggaatggtctcaacccagacaatcaagagctcaatatactacttctcgaacacgatacagcaatgattcagagtctggaaagtccaatgcaggcaaagacgatggatccatctggaacaacatcagccagaagctagatgaggttaagcaaaccgttggctccgccgagtgggcggatgtggggaacatcacagactatatcatcccagattggacgcgatttctaccagctactgccaaaaagctccagcgggagctctccctatctcccggctcattggcagacgatatttggagggaggcacaggaccctgatatcaaccctgagattctccgcgacgccaaggtacgagtaagtgaggatctttgcaacgaagagcaggcatttagacggcaacgacaacggaaggttgtcaaagcattgtcatcttacctcaaaatacccgtggaggacatccaccccgaagacgtaccggtcattgcggtgtgtggctcgggaggtggtctgcgcgctctagttgcaggcaccggatcgtatctggcagcacaggaagcaggtctgtgggactgcatcacctacacggctggtgtcagtggcagctgctggctgcaaaccctctatcattcgtccattgcgcagcaagacttcgacaagcttgtcgaccatttgaagaatcgtcttggtgttcacattgcattcccgccggcagctctcaatctcctcactactgcgccgacaaacaagtaccttctcagtgggtttgtggaaaagctgaaaggcgatcctggtgcggactttggactggtagatatttacggattgctgcttgcagcgagactattggtcccgcgaggagaactgggagtctccggttttgatttcaagttgtcgaaccaacgagccaatttgataaatggggctcatccgcttccaatttacacggcggtgagacatgagattcccgtcgaagccctcatacaaaaagatcagaccaagaagaatccaacgcctgaacagttggcgaaagagtcgcgacatgaagcatggttccagtggtttgagttcactccctacgaattcttttgtgaagaactgaatgccggaatccccacctggtctttggggcgtcacttcaacgcaggccgctctgatgtttccgctgacaatctccccatcccggagttaaggattcccgggctcatgggtgtttggggtagcgctttctgtgcgactttgtctcactattacaaggagatccggcctctggtcagcggcctggctggatttagtggaattgattctctcatccaaggcaagaaccaagacttgatcaaggtgcatcccatagaccctgcggctatacccaactatgttatgggcatgaaagatcagctgcccgactcctgtccggagtcaatcttccgagacgagcacctgcgtctcatggatgcgggaatgagtaataacctgccaatctacccactcatccgacctgggcgcgatgtcgatgtaattgtcgcatttgatgcgtctgcggatgtcaaacaggagaactggctctctgtggtcgatggatacgccaaacaacgtggtataaaaggttggcctgtcggcgccggatggcccaaacattcgagcctcaaggataccgagaaagcactgcgcgagccaaataacatcaccgaggggcaattgacagataaactcgccgacgctatggatacctctgaacccccacccgatgatcaagagcccaaggccggcacagacctgggctattgcaacgtttgggtcggcaccacagccgagcgaacctcgaacgacgagcctccgccatccaaacgcctatttgattcttcctacaacgaaaccccctccgaatccgagttccacctgatgcgcccagatgccggcatcgcggttgtctacttccctctgattcccaatccttccgcaccggatattcctcccaaacctaaaactcgtccgcgcgcagctgctcagtccatgcgacaggatagctctcaaaccagagatccggaactgcctcttgctccacagcccaactcgatcgacccggaagttgatgatttcctgtctacttggaacttcatctatacgcctgagcagattgattctgtcgttggccttgcaaaggcaaacttcttggagggtgaagagcagactcgtcgtgttatccatgctgtctatgagcgcaagaaatccgatcgcctgcggaaggaggcggcagagcatcggaagaagatggaaggctttgtgcctctatgattctcccgtcaacttccaccggacaaaacacgactttggtcgaagctgcatttaatactacattgttgtaaatatagacgacactttttgacatttttacctcgcatacccatggcctttcctttcattttcattttcagttggtttgagttagatagagcttgacctagacctttcatttatgtatatagtacagagcaaacgacctgtgacaatgatgaagcatagaagagatccaatggtacattcataaatgcactatgcactatgtattacttatgcacttgtacaagttctagctaataatttcagagctctgatcggttttatcctgttgcagcaccattcttctcaaaattcgtcttcactccctcaagctcttcactatgcacgctcttgattttggccttccggccctcatcagtagtcatctcatcgtcactcccagcaagactaacatcctgactgtcacccgtctgcttccgcagtccaagttccttctctagcgtatgtcccagcttcttagtcttgtccgagatacttgtagcagtacttttctgcgacgaagtctcagaaggaggctggttctccttcttatccccgtgcggcattccgcgccagtcagccggctcgcgttcatggatggaatcaccaggtttgggctcgctgatcgctaccggcgcgctatcttcggtctttttccctttcccttcgctcttgatagctgcgctggcttccaccgtctccgtcgcgggataccgccatacaactttcagcttgtctaacgcccggatccccttcctcgcactccccttgatcccatccatcgcctcccattctgtctcgaagacgcccgagtcgtgttcggcgccgccttcgaaatatgggttgaaccatacgtgtgcgatggaggttaccatagcgaagccggtataggatgctttgctgcgacgctcgaagtcgatattcacatccgagctagggacaatgagtggcttgtggggtttgtagagaattgctgagatactgtggtcctgcgacgataagccggagatatcagatcccgataccgtcggggacgaagtcgcaggcgagggaattggattcttgatcctggagtccgagttaggatctggcttggtagcctcttgttcctcagacgtcgagcccccgtcttcaacgacggtacgctcgttccgatggaacagatgaaaacacttaatcttcttccccccgtccacatagccctccacggcaaccttaaccccatctttcaagccccatatatgcacctccaggatctccaccggccgctcgacatactgcttccccagctcattcgcccacttatcgacatacccgacataccgcagctggctggggatgctaacgccgctcccgaaaccgacccgcatgcgtcgatccgtaaaccgctgcagcgcgtcttccttcttccacccttcctgactaatcagatatgcacacgcgatcgtcccgctacgccctttgcctgctttgcagtgcacgacggcgacccgttcgtttttgtctgtgtctggcgactccttgccctcgtctagccgctgtagccagttccgcatgcttcccattatgacggggacatacgcgaatggcggtgggtggtggtctggccaggggaagtggtggattcgtccgtagacttctgagtcggggtatcctgtaccttcggcgcggaactcccagatacaccattctttgccatgtttcgtgtcaaggaagttgactagtgcgtctagtgggttgcggtaggcgcgctttgggtatgttgatgatggaccggaggttgcgatgactgtggagtatgttaatgggtgtgtgtattttggtgtgggatcgataaggatgctaccattgtctgtcacgtaacagagatctagccctgcttctgggtggtgttgtcttggacctgcaactatctggcggagaattgatgactggcacattccaaggttagcagtgggacggttactgagctcgagctggcataccattgacagagtgtataggtgtttataatttgtatattccaccagaaatatgtggtagaaaagataatatccaaatcaaaacaagcacggggagttctgttattttcgcggatgatgtcatccggtgaattaagccctcttggctacaggtaatctactaactatattcgaccccggacctttatacaacaaatactactgtaacaactatattgcagcaagaaatttaattcctttgtacaccgtagagtcatagactaaatacacaaaatatttccatcagaaaatccagaaatttctaattgagccacatgtcgcgtgcccatccaagaccaattgagaccatccatccattacattagaaaaaaacagccaaatccacgcaataaaaagcatcacaggtccagactagtagcaacttatgcaatgccatactcctgagtaggcttcataacaaactgaatcgggttgtggtcagggacggtaacattcttcgcgccgtgctggtaccaagtcgcgagggtattgtcactgagctgggatttccaggtgtgagtgacatcgacattccagaccgggttttcagcaggagaaacaatggtcgtgatgttcttgtcgtcgcagaggacccgctcgtctgtgacgccgctgcagttggtgcggaacttgggggtcattgtgttctcgcggccgacaatgtcgtatctgtagacacagccgcctggggagcagcctatggtgaagttggatacgccccagatgatgtcgtcggtgatggtcttagtctgtaggctggcggggcgtgcactggctaggccggcgagcacgattgggaggatggtggtaagttgcattttagattatgaaattgaattgtttttggtagagaagagtaggataaataaataaacaattgagtggtaattgggtggttgaatagatgaaataataaggaggaggtgggaattatatacttaagaggcggcaggcgtttacccttccctgacggccgcccttggcactcggaaactcacgccgatcactttcaggggaatgtggtgaatgacctcccaatattcgatacaagagaactcgcttggtttctagaaagccttcgagccatcgaatcaatcgcttgacgttcataaagggtttattgtccgacaagttaccccatgatcgtcatcgaagtctttcagcctgactatttatagtacatggatccacagggaacagggttcatatcaaggcgccaggtgtttgcttcttgtgaagatgatttgagaacagaacagggcagtaaaattggctatgatgctggggcaaagttgtgggtaatacaagtgcgaagagaggatatatacatactgaccgaagtcaaaaattgtgtgacatgcccaagggataattggtggtcttgaggaattgtgtggcgtgtattagctgcagattcgaggcaacatgccgtcaaggaaatgattattctgatcgattgccctcgagggacaaaggattccaccagttgcacagttgcatgtttcactagggcttggcagagccattgtcggtgccactggcttcccactcatcccagccctcctctctcatgttttgctcaatggctagacgacggcgtttcttctttcgacgctctttgttataatcacgtcgctgctcgtccgacatgctcagccgacgaaccgctggcggtacagggtgccaaccggctttctcgttcgcttctttttccctctgtttctgctgtagctcctcatctagcttcttcacatcgtcccgaatgagagggtgatattgcagtcgcatcgcaaactcgtccacagaccccgcacagatctcacggatttccgcctgcgtttcagggctgagactggcgtcccgcttgatcaggtcctggaagtacataaaaccggaccggaaattccctgcatccaaacacatcaggatgatagactcgaatgtaacaccgttcggtaccactccaagtgatgccatctctttcaccaggaacatgcccgattcgcggttgcgggccgttcggcacatccgaattagcgcgttgtaaactcggacgtcggcgccttccgggcataatgtataaagctctttgtagaacccaacaccgtcgtccaccacagatggatcatcatgggcatcatgttcacagagatccgcgatgacacgtacagagccgatgggaatggttcgtttcgcattcttcaaccgcttgagaatctgccacgcctcccgacgatcaactttactctgtatcatatgcgcaagaacacgctccgtcgagctatctgttaggggaatatgagcttcgtgcatggtgcaaagcgcttcgaacgcagcaggcagattgcccgctgtcacgtgcgtctcgacaagtctttcatactgtgtgcgctcgagcgggatcccactctcaccgaggtaacggaacacagagctcgccatctccgtatcaccagcatttgcagccattttcaatacgtcatcgcagacttcaatgagcggatgcatgtagcccagctctaccatccgtcgccacacgtagtgtgccatggggtaatggccgtgcttccctgcctcggtcaacacgtgcatccaaagccgatgggtcatgtcgtggccctggtcgacgcgcgcacgcatcacatcgtacacttcatccagctctccgtggtcgcaaagcgtgtagacaattatactgtgtagccagttttccacaaatatatccttgcgctgcatcaatgcaacgtgctcgagcgcgagctcgatctggttctcgcggagaagaccagccgccacaaaatgccatccggctgggctcagcgtgagccatcggtcgcggagcttgttgaggatttcttgtcgtaggaggtagtccggatgtacagctaggacctgtattggaattgcatcgttagtttcgctgcatatgtagctcgcttcaaccagataacctacctgcaatgcaccgtggagtgtcccagagtctgcggtgatgccattattctccatttcctccagcagacctcgcacaagctccggcgagcccctctcattatcggtatttgcaagaatcagcgccttgtagtggcgagcattcggcttgacatggcggtcccgaatgagaagtcgtaggatctgcgttatgtgtcgaatgttcggcttgttgtccattgcatattgtaatcgcgactcgagcccttcgttcgttttacctagaaggtcgtcttgcaccttatgtgttcgtgtgtatagcgggctctttcgtcgtggatgtggcctggcgtatgttggatctggagataggcgagtgtcacggaattcattctcacgtggctcccgtgtttcgctccaatcattatgatgtgctgcattatatgagaatttggaatcatcgccgcctgaggtgttgtagcatcggcgcgaacctgagctcgggctaggaatcgaaggtagtgggtatagcgggtttcgacccttggatttggggaatgccgttgaacgactgagactcagagctgtaaatgacggacaaagcgagtaccacagcccatcgaggaccaacgcccgccgcgacatatccgcttgtggctaactgatcggaagcttagcctccgcggatttgatctggagtttgatatcacgtgacatcctcgaatattcgcttcttggattgcgcgggatttacaatgaaataggtaagtcaggtttgggtttttggaacataaaatttagaggtagttgtaaatcgaccaagtgacccagatgccgtgaaaatacagagccagatacgccacggccatgctcgatcaaaccgttccaccacacctttcgagcgacctcaccaccgtctcctccgggggtatctcgtttgccgtcttcttaaaatcattgatgcagaacacacttatgtctaattggggccgcctcgtccccgaccacgtccaccgcggccgccaccaccaccccgaccacggccgcggccacgatcaccatctcgcccgtgaccgccgcgacggccttgtggttggttctgttgctgctctttaacaatttcgacaatctcttcgggaactcgtaggtatttgatctggtggattgttagcgtatagcctaaggagcggggctctgcgttgattgcgtgtcggagggcttacgttgttgccccggatgtagacttcgggtaatctgaagaagcggtcgccctcaggactcgtctgcactacctcgcgcagaatcaggttcatgaagttgtcgcacgtaaccaggtggccgttcagagtttcgccgttcttgagctccacgagcatagggtggccctgtgcggccgtgaggagaccgagaggcagctgatcataaactgacttagtataggtgtcggaaaaggcgtttgggtaaagctggagcttaccattttgaaatacgatcgaggtgggtgaaggtgggagagttagttggcgcacagagttgaaagagcgcgggttgttgcgtgtgtccaaagtttgtagcttatggattgaacggaggaattagacccggcactgttgatttatctggtgatgttgacagtagcaatggattcaagctctaagagatgcgatgaggaagccggaaaaagggaagtgccgagcccaaatgtggcttgggtgccatctactacgaggaaccttcgaattctttatattcttctatttacgtccattatataccaaaagcatagatctacagtttgacaactttcggtaacataaattagggggtatcgactagaattgagcttttgaggttgcacacctattggagagaagattaatccgttgacttcgaaaacatcctcgtgtgcattacatagtgcataagagaactgagcaccgcaaggcttaaacctttggtcgcttagctagctgtgtcccgtcctcctcctcgtcgtcatcatcatccataactgtgagcttgcgcttgacacgccggtctcggctaccggtaggagccttgctaacttgtttgtttgcctcttcctcttcatcctcaccttctggcaagcggccctcgagcgcatccaatgtgatctcgtaaccctcctccacattttggaccgtagcatcaagtttctccactcggtctagaagctccagttcgttcaaaagttctttgttctttttatagagacgttgcttggttagcatacgccaccaatagtagcgtcggtcatcctcattttcggccttgtacttcttgattaacagtcgggcaaggttagtgccaccggccaggcggtggctttgaggaatctgaccgagaagatacatctctagaacgtgtgcgaactgcgtaggttcgatcttgaacgatctgcggatgtcatgtagaagcttggtagggatgagggcggaagtaggcacattgcgagggcgtttcttttgagaatacgccccaaggggatcggggttgagattcacgttgtgcctcaggaactccggccgcagcagacaataatcggctgtatcccggagagcgtcgaactgttcattggggtcttcgatggtcaattctagaatggtcggatctgcgatgcaggccgcgtggattgtggtatataggtgtgtgccgtggccggcgcggtggtgtggagggagaataaggaactgggcaatgcggagtcgtgcaggaagcttggcgatattgacttctggtaacgggaacacttcgttcttgaccgcgggcgtttgtgattgatctcgctggtaataccaatagcggtacgttgtggcatatccgacaatcgaatacgatgatgctgttgctgttggaggagtcactttctcatatctgtaaatcggattagcctcaggtcacagatatcagcacaagacaaacatacacgaaatataccctccaccggtcgagcgtccactcggggtcgtctgtctctaagggagttccagcttcgatgaagagggagacgagaacctgcatgcgatccagaattttccgcacttcagggtctgcaagtgatccagcccagacctcatattttcggtcctcaacctcgtagctaatgacaaactcgcccggaggcttgaagtctttcgcatcagggtcgttttgaacagctttctcatagtcttggagatcggcgaacgcctctgcgcaaaatgtggttagcttatatcgcgcccgctgtcgcacaggccaaactcaccttcttgaacaaagggtttcaaagtatcgagaagatcaacagcagctgtgtcaccgacggacttgaacttctcgtcgtaagaaatatgaacatgagggcgcaaatcatgggcggcgaagcgcaagcggataatcaagcccctgtagccgaatatttgctcatcgtcgccaaagataggataggtaaattgggggtggaaggttgaaagtgttttcggcttcttctcgccgggttgaatgatcgtgacgtgaaccgcatcgttggcgtcgcaagaccctaaagtgaatcctaatcagcttatatcttggcagcattagatagcgggagactatgaactcacatccagcttcgctcgccattttgacaggatatgtggagtttgaatgtcaaaagagacgatgaaggatctgaggtctaaagagagacgcgaataacgcgccccggcccaggcgcgcatcagtattacctaatctggatctatggcccgcctagctctagacggtaataaaccttgaccagtcactactattccgtacgccgtaataaggattgaatatctcattaacagactgtctaaggaaaaggctctatggctccagctttacgcacaaattttggaagcctctgattccggactattcacaagtataagactcggacaagacaagtgagaaaatatatcagggaggtcaataccactatttacaattcaggaagctgcgagtactcggatagtaacagaaaagaaccttccaaggaaggggctaagttggaacactatccagcttcattctcggtgatgatatagacgctagttgccaccactagacatcggcaaagcccacccggcccatagcccagcccagccccacccccccaaaggccgggggtttgggtgaactnnnnnnnnnnnnnnnnnnnnnnnnnnnnnnnnnnnnnnnnnnnnnnnnnnnnnnnnnnnnnnnnnnnnnnnnnnnnnnnnnnnnnnnnnnnnnnnnnnnnnnnnnnnnnnnnnnnnnnnnnnnnnnnnnnnnnnnnnnnnnnnnnnnnnnnnnnnnnnnnnnnnnnnnnnnnnnnnnnnnnnnnnnnnnnnnnnnnnnnnnnnnnnnnnnnnnnnnnnnnnnnnnnnnnnnnnnnnnnnnnnnnnnnnnnnnnnnnnnnnnnnnnnnnnnnnnnnnnnnnnnnnnnnnnnnnnnnnnnnnnnnnnnnnnnnnnnnnnnnnnnnnnnnnnnnnnnnnnnnnnnnnnnnnnnnnnnnnnnnnnnnnnnnnnnnnnnnnnnnnnnnnnnnnnnnnnnnnnnnnnnnnnnnnnnnnnnnnnnnnnnnnnnnnnnnnnnnnnnnnnnnnnnnnnnnnnnnnnnnnnnnnnnnnnnnnnnnnnnnnnnnnnnnnnnnnnnnnnnnnnnnnnnnnnnnnnnnnnnnnnnnnnnnnnnnnnnnnnnnnnnnnnnnnnnnnnnnnnnnnnnnnnnnnnnnnnnnnnnnnnnnnnnnnnnnnnnnnnnnnnnnnnnnnnnnnnnnnnnnnnnnnnnnnnnnnnnnnnnnnnnnnnnnnnnnnnnnnnnnnnnnnnnnnnnnnnnnnnnnnnnnnnnnnnnnnnnnnnnnnnnnnnnnnnnnnnnnnnnnnnnnnnnnnnnnnnnnnnnnnnnnnnnnnnnnnnnnnnnnnnnnnnnttgtacagagatcagacgaattggtaaggtgatctgggaatagcttcatttttaatatttatggatagatcattttttttagtatttgtgcgtagattagataaactagtcaggtgatctaggaatagcatcatttttggcatttatagatagatagattagatgaattggtaaggtaatcatgttttttaccagactaaaacaagtgataaaaacctataatttattaatcttatataatctgacttataagcgccaagacctatataaaatacaaaaatgggctaaaataggcccattatgggtttatgggcttagcccactgggctatgggctgggctgggcctaggggagctgggcccatagcccatgtgggttgggctatgggctgaaatcttgggcccatgctgggctttgccgatgtctagccaccactacacctaatagacccgaaggttcaatagttattgtctagcatctatatcttgctgtaccttatctagcttgccaaaacattcccgaacacatcttggcgacgaatattaaagatgatatctagagtgaagttcgcaggctgtctttcttttaactttcattcctatcatgtattctattccatcgcttctgatctagtttccatttcccagctgatttcttcagttggggtatcatttccaaagctcgccggatccccgtcgtacgtcctattcgctccagcgcttcaacaacccaatcatgaacttcgtcaggaatccccgctgcgctcccggcaattcctagtggaaaaagtagcatgaatgtaccatttaacagtggtatatctgacgggtcttcattgactccttgctcgaagatagcttcctgacttgcagttccggcgcatatgtcacctgccatgcaagaaatcgtgtccaatgcttgccgccgttgaattacatcgtctgcggtgggtcgtgccattttcgaaatttgggatacgatggtctcgttgaccagtaatcgtgcccagcggtagtggttgaaaactctcgcaacccacatgttcgcgtagacatgatactggccacgaaaggtgtgctcgtatgtgttgggttcttttatagcgaaggaccagtggatcgggaggtgagtttcccactcgcggagttcatcttcaaataatagggctgagttcactactgctctggaaccgggcttttggtgatgcacatgtgcatcgaacttcgtatatcttatcagtatgtcaactaggtcgacatctggtaagatatccggtggcgcagatggtatgagatcaggagaccaattcagtagatctggggtgacaaccctcttggagaaatacttgacaattgagacaaagtagaattgtaagtgagctcgatggttcaagttggtaagtgatgaccgaaagatggattgtttaagtaacgcggccgcaccattcatatgcactatccaagagttgagctggtttggggtacagctgactatctgcgcgggtcagtttgaattataaaaaagcaattagaaacgaaatgcatacctcgtacagactcagcattacgatcaagtggagtgttctgtcgggattggcctgagtggggttctccactacttctcgtacagccttgatgaccgtaacatgtttctctcgagataatatccgcagttctctgtcattattgacattggacaaggcagcaaggccgaccgagacgatagcatctcgactcgactgatcgagagtaatggccccaacttcaggagatggcttcacagtacctatctgtaaagagccatcttctttggtgacaattcttgtcacaaaacggttaataaagaacctcagcccctgatcctccaatgggatggacagcggggcagcaattctcggagtccgaatcaattggctcctgctcctgcagactaatgcatctgacggagaacagtcgggtcgcgagccgggggtgggtatatcatattctagggcactatcctccaatcttcgacgggcctcggtcttagcttttgcctctgcacttcgtcgagcggccttgtcattctcatcccggaacattgaagacggcacatcccgatagccgccacatggcttgcctgctctcctgcattgggaacacaggggctcaagccggtcacactagaccatgtcagtctacaattgggctggtgttaggccacgccacttgcctttatccgtctttcccgacaactgccgcaacatttactgggacgaccatagaacggcattgtctcttagtggatgcgggtggtcgtattcaattctaaataggcaaagaattcgtgagatcagcccgtgaacatgagtcgatgaccggggggcttggaggcttggactccactatttagtgggttcttggcatcgatcggcctttcctaattgggtatctgtttcatcctagtcaaacatatgtacagtctacaacaaagtatgtacacatcagatcttagttattgaatgtctttgattgtggctttatcattccatatttgcaattatatttgggcactcggctgttgcgcgagacagtctcgagacgatccctagatttagttcgacaaacattcgataaacataagaaaactagtatgaggggttcactagctaaaccaagaaatatacatggtaaaagtattcgaacagggtcagcggtcgaagaagcccttctagggcatctaaacgtagacctattgtacatggtaaacatgtgcctgacccttcacgtggtaatgatgtggctgatgatggtgatgagctttctgcgagctctcaagtggggcagtgggcaaatctgtcgatgtgctggctggaattgtactgcccacaaaagatggggaagtcctactgttggctgcaatagttgatgatgtagctgtttcggtgtccaaaacagcagagactgcaatagttgatgatgatgcaactgtttcgatgtccacgacagcagagacagcagcaaactccgtggtggttgagtatgaaacaatcgaactttgggtggatacgccagaagtcgtagtcgttgcgctaggagccaagctcaatgtagcggacgacgcacttggtgtgggattggccgtagataaaacagctttggaggaggatgcagatacaacatcagactcatccatgtgatagagcaatgatccccagcccaacccgtcgtaatgaccagacccttctccccaggatcccgcaccaccctccgcaccgccgtaatattcaagagagttgttgaggtaaagagtggtccaaggtgcgtccaattgcttcagcacgacatagtggttgtagagaagctcccaggtaggtctgatggctccacgggaggcattactgatctcggtgtagctgactataccgttcgtgtaggggacgaagggaacgtcgtttccaaggttgtatcgcgcaaagtactccgttctagggcgaatattagtaattgctaaggcggaaaccttgggatgattggatggtacttacccacggagaatccggctatcgttataggcaaacaaatcctctccttggttcaaggcctgctgcccgataacacctagaagctgtatgtctaacgctgagtggccctgatcacgaccggattcttggccttggccgagtaaagttccagtactaggttcttcaacgatattggtgatagcattgttgatggcacccgttccatccccgttcttgaagtaattcacagcgaaatcccatactgtttgattgtcggttatgacagccatagccatcgccgaagcgacattgcacaactcccagttggcgaagaaatgaagaatattatgctccgacgactcttcatggttcagccaggtgtagtgcatcgggataaagatgttattggccatttccacgacagatgggaggacatcatccacgaagggctgatagtcaagaaggagttcggctgcgttggcgagttcatacccctgcaggccagctgtgaggtacttgtcgtcgccaccaccgattgcagtgagattggtcgcccatgcatgcaggatattgctagcggcatcggcaaagctcgtgttcccggatatcttccagcgtaagcctagattgaaagctgccgcgacgtcatgccagaggagctgtgcgtttgcggcattgtcttcccaggcactccgatagacaacgctgactgctgaaggagtgtagctggcgtccgacaatgagaggcttgtcaaggtattccaagatgtagtccatggatccagactggcattgatctttttctgggtgcgagagatatcgctttcagagacgaggaggccagggtgcacaaaacttgctacaagggggagaaaagggataacgaaagaaagagaggggaccattgcaaagagaaaggcagcaatgagtacaaatatggcaagaaaaagaatgaaggacaaaactaaagatatgaggaaccagcctagtaatatagagatcgttattctctggttagattaaactacaaataaagcagagatatattcgaggtctatgaaattactccgttcttaatttaaaacagcctgtgtttcagctatgcgctaggaaaattggaattccggacagtttcatgtttctaggtgtttgtagacattagctccggtacctgtcgatcaagtactccgtagttgtcctgacatcggaaatgaggttatattcggctaggaaattcgtgggatctattcgacaagaaacagccaagatattctcatagtacctgaatttattatggcatgcgtactcggtctatgcttccctccttaacgatgtagcacttcaataatgtcttcacgatggtatacggggtaccatatggtagataactccgatgtcttttttggatggtcttcctagatatctctttagacgtctttttacacttgtttgcttctcttcttggtattatagctagaagaatggtcattgactatatcactctacaataggggtaaacgcataaaccctgtgtataaccagagatcttttctacaactcaacggaaattgttccagaacagcttccagtggtatcgtttggggttatcctgtttcttctaagagacatcatccatatgggacccgtgttccccgagagaaaaagcaggtggaagttcatgagttaggcccaagagctgcgtttctgatatgccaggctaagctgctgaggtcggctacatgccatgttacttcgcagagactagctctactaaaagtcaatttcgtatacaacagcacaccgatatctggccgaggtaccgtttccattgcatcaacagctattttcatgaagtatattgccaaaaaaagatattgaattacgaacgtgtccggttatatgacttttcgaggtcttaagacatctccctagagagttgagagtgaaaaaagaggaatagtgaaacgggcgaatgctatagcctacagttacggttgagtggcctaacacttaccagctaccttaattaagagatgcctaaccctatttttcccctcccggcagtggatatcgttgctgctgtattgtatgccattgttttcttattgacagctatacaatggatttgatgtaggcctgggtctgaagcgttccagcttggcggtgtagtgatgatctctttggtcgataccacagaaaagacgctgaacacggggaaaacggtatccaagtaggtatcattatccagctagtagcatctagcttgttcgcagtagcgcttgggcgtttcagtttcaatttcacttccaagcgcttcacagggtctctaggttcgatctgtctctcgtcgacttcaccgaagccacgacaggatatttgggcactcaggggggctgccgtatgtatttgataccctgtatacctgtccatgtgttgccctttccgtctgccggcatccaggaaggtatctgccatacttgggctttcgactcccaaagggtccacacggtagcggtgacccggagattcggatgcgataagaatggcggggtcgatcggctttgggtctgtggtctgtgatctctgcatatgtattctagtggagcatgggtgactgctgtgttcttgcatcagtatggagtatcaatgtgcaagcgtggccgacagtggcttgcgtagctttcgtggcttgaacatttcatattaaatcatggatcgatgttctttgctatagacatagcaggggtaaagtgaagtaatctagacaaggtaaggaggaataaatgcagaaagaatcgatccaagcaaggatggttgcaccaaggccagatgtgtggctggagaacatacaacatgttctagaataaaccttccaaggacaagccctatatgcatgcctttcaagggcattgtcgaataaaaatatcccttctaaatacgcatatgttgctcgtaccttgtacatatttccccctggtatgttttgaaagcggtacctgagctacgtgggtcccccgggtccttccaacaccttggcctcttacgccttacgcaaccacacatctccagactccctctggaccctctattcaattcccctcaccatgatagaaagtctatagagtgaactgcgagatcatcatggagggactattcactctgctcgccctgagcattgtgatggcaattacgtgagctacctgtgttcggaaacctaagattcacttggaagctaatgctcatgattggcagatcctttgtcgtcggctcattacctctggcttttacactgtccccctctcaactccgcttgatatcatcgattggtatgggcgttctggtggggacgtcactgatcgtgattatccccgagggcattgaaactctctacagcgcgaacgctctcactcgcaaacaacacagtacacgggctaccgctattgaatggcagcaccaggccccggtcgtggcagccacgtttggcccgaacggagacagcgcctcaaccctaccgtccgatacccctgtcccgggtcttcttctggaaagagaccaactctccgagtcgcaaacacttcatgtccgtaaggaggattcggatgaaacaacggccaaggacacaatccacggagacgaggagagttcgccacatgcgtgggtcggaatcgcccttgtcagtggtttcattttgatgtacctcgtcgataaattgcccgaattcgcagcgccgacaaaaaacgatcggaccccttaccatatctctttggataaccttggatctgggttgcggcggggttcctccccctcccgcgatggtggactgcttgatgcgaaccacgcgtccagacgtggccacagctttgcgaccacgaccggcctagtgatccacgccgcggcggacggtattgctctaggcgcttccagctcggatgccgggctcagtttcattatattcttggcgataatggtgcataaagctccagcgtctttcggattaacatccatcctgctcaagcaagggctgtcaagtcgcaccgcgagagcgcatttgctggtcttcagtctggcagctcctttcggtgccttggctactttcctctttgtacagatgatgggatcttccggtgccgatgaggcaggcactcactggcgcactggaatgctactgcttttctctgggggtacctttttgtgagtcttcttttctcggtcagaaccatagacctttatattaacccctgcaggtatgttgcgatgcacaccatgcaagaaaacggcccgggctcatccccgcgcgaacttcctatcaacggatatggtgaccgagaccagaatggatcagacaagtccatgagagacttgattgcatctgttttgggcatgatcttgccactattcttgcaaattggacatgctcattgagcaagtgcccgtatgtattccttggggatacgccatagtgcttttacattttcgctcttcaactagattttggagggcttatacccattgcaaggtacatttgggagatgggttattctagctgagataaattgagatacgggaggatatgtttgaatagatttccttgtataactgctgggtgctatatcggtcataattgcatgatatctcacgatcacatctacgtagcgtcactgtgccatatttaaagcatgacaaggtccccgacgtctgacttctccgaagaatactttttatcttcccatgatgtcggtgatgacaagattcgtcagtttcgtcagtctgaatcatcccggcgttcttgacaggttccacggtcccattccgatagccgcatgccaatccacagccttgggtcaatatcctcgtgggtgttaatgggtatcgtgagtgtcgtgaatattcaggttgccttgacagttcacgagattcagccccggagatctatgacttggtcttgggccaaagcacctgcgtgtctacattctcgacgcctcacttttgcctcttttgtcataaatccctaaaaggcaaatctcaggcaaatcagaaggcaaaaagatgcagaggaaacatacgatcagtgtcggacacataagatccatataaatcccatctgctgaactagtgccggcgaggccatgctttgtcagaatcacgacacctccgcttcaactgtcccctttcctcgtcgcctgctttttcattggaagtcgatttcggactttgattgaatgaaaaagaaacgacaaaaaaaagtgatatattcgaaaaaaagaaaaaaaagaaaaagaaaaacggggggcctcgatacattcggaggattattagtctcacctcccttcttccctcggccgttcgccagcctctcctcataaccccgaacatcatactcttgactcccgactcgctcataattgtatgccggccctgaacgctagaaggctcagtgcgttgcatcaataaatacaaatcggacaagtgggaggatcatcctagactgtggcggcctcccccctgttctgcggccatggactcccatcgggcatcattcagcgacatgggagatgggtcgaatgcgcacacaacagatccgttggaccctcatagccaaccgtcccacgaatcagtcaatactttcgccagtactccatccagatcactcagcaccaagagcaccgtcactcctatacccgccaacctacttccttcagcgcccgcatcacccccgacacccgcgcccagccctaccccccatcaacgaccaccaacttggcacacgaccgatgacgaagagactagctttttgttaagccttcgcattcacttcagtactctatccaacggtcgaaaacagaaactcctggagggccttttggacatatgcgacagccagcatctgagctttgtgtcgagttatgttggacctcgattgaggaaagacccatttcaggttttccctaatgagctatgcttaagagtgagccgtttggtcgagttctcttcttatacagtactaatgttgcgtctgcttaggttctctcctttatcgacgatcccaagactctcgcccgagcctcacaagtatcacggcgttggcgagaactattaaacgatgacattacttggaaaaacctatgcgagaaacatgcgtactcggtgcgacgggtactggacgatgaggcggacctcgtcgacccattcaccgcccaccccgtagacccggtttctggctcacgcaccttccacggcctgcagcggcgcttgaccgcatccagtggtcaggccacggagagtgcaccggagctaccccgcacgctttctggagaatggttgcctccgacaagcttctctcgaagacgtcggacccgacctgtctcctaccgttcacagttcaaacaaaaatacatggtcgagtccgcgtggaacaaaggtggtcgatgcacccagcgccatatcactcctgaccaaggtgtagtgacaagtcttcacctcactccgaagtatattgtcgtcgcgttggataatgcgaagatccacgtatatgataccaacggtgacaatcaaaagacccttcaaggtcatgtgatgggagtatgggcaatggttccgtgggatgatattttggtcagtggaggctgcgatcgggaagttcgagtatggaacatggctactgggtaagacagaacatccacggcttgcacgaacaaaaactaacacatgatagcgcggggatccatcttcttcgaggccacacatcaaccgtgcgttgtctaaaaatgtcagatcggaacaccgccatctcaggatccagagacaccaccctccgtatatgggatctggctacagggacatgtcgtaacgtcctcgttggacaccaagccagtgtaaggtgcctggccatccatggtgatctagtcgtgtcaggcagttatgatacgactgcacgtatatggagcatctctcaaggccgctgtctccgcaccctttcaggacatttcagtcagatctacgctattgcctttgacggccggcggatcgcgacaggaagtttggatactagcgtccggatttgggacccgcattctgggcagtgccacgccattttacaaggtcatacgtctttggttggtcagctacagatgcgggacgacaccctagtgacaggtggctcggatggctctgtccgcgtttggtcgttgactaagatggcgccgattcaccgtcttgcggcccacgataacagtgtcaccagtcttcagtttgataagactcgcattgttagtggtggcagcgatggccgtgtcaaggtttggaacctacagactggtcagctattgcgggagctttctactccggccgaggcggtttggagggttgcttttgaagatgaaaaggcagtaatcatggccagccgatctgggcgcactgttatggaggtatgtggcgatgttctgtcttatgagaatatgttttctaatatatatcgcaggtctggtctttctctccaccacccgatgatttcgatgatacagccagtgagagtggtttaatcactacaggcacaagctctgttaatgaccgcgatctggttccaactcgacgtcgaaccctctgctccgtccccgcatcgatcccgttgggcactgatagcgatgcacttatgccagacgcgccctcctaatcccttagcatttgctggtctgaacagatccaaatgcgttttgatatcctgccatctaacgactacgcatatctatttatttgtcatgtttctctccccatcttttgaagcgcggtgtgtttttttcaacagtgggtgttttgccttcagaatgaactactggcgtccctccctatgtgtttctagagcaccaaacggttgcatatttggtgtcacaaatctgtttggttactgtgccttgttctttatccagactgatgaagttgccatattggagttgtgaggcctttcttttacattgttcttatttcatatcggccatttcggagtgttttctggttgagtacatgataccttttggggaacacttggaatgtgatttatataccatctagtccgatgaaatctatcatttacattcctactctttcatctcgcccaagtttgaagctcaaatgtccaaatgtccaactcgtggcctagacctagaatgactaagcgggtctctggctcaccccgttcggggaatgtcccagcatcatcttctagaccttaacgcgagcattggttactgaaatacagaactctgctttagaaaggccattcgtacatcctttaagatgtgtatgtgcttcgctttgactaggcagccgagttgatctagttaccaccgatgacatacggccgtcctggacctttgtgaaacccagatctgagtccgacctgcctgtaactcgcagtcccctttgcgctttcgctcaaagtacccgcaagtcttggaggttccttagacgactgccggcgggtaaacaatggtctatgggggcaagccaagtaccggatgttacctgtgtcgcaagcggaagataaaggtatgttccgagcttcaatatttgtttttggatttaccccgccaatgaatctgtattgtgtctgtacttatctttcttctttgcatgcattgaaaggtcaaatgctaaattcctcccttcaagtgcgatgaagcacacccggagtgccggaactgcatcatctatggccggccatgtcctgggtaccggccggatgctgtctttcgcaacgagaccaggaaagtcgagcggctggtgaagagcaatgccggtgtaaattcccatagcaattccgacagccagaacggctccccaacggcggactcatctatgtcagctgtctcgcaccgccgacgcgcaaactcacatgccaaacaccatggcaaggctaccctgacgctatactcgcccgctgactccagctgggagcaacgagcactctgctacttcttcgaccagtacaccatcaaagctgatgccgatgatggcggacacctcgaatatctacccccgctgtacgcccgcgagctcggtcgccagagcagcgaatcgccgtctccttgtttgcggtgggcggttgatgccacggcgctgatgactctcgctaatgcgaagaatgccccacctctcatgaataaggcgcgggagggctatgggcgggctttgcggggcttgcaggaggcgttggcgtcgccggctaatgcggttaaggatgagacgtttgcttcggttgttttgctttcgctgtatgaggatatctcgggcgagcggaatgggctactcagctcgcatacggccgggtttgagttcttgatgaagctccgtggaaacacgctggttgatcatcagcgtggtcgagatatgcttacatttgcttatgcccacacggtaggtttgactctgacatcgggaccgtataaatatcggtccgagactgacgtttgtatagtatgttgaaatacttgcactgggagacaagccccggttcgacatcaaatgggacctcggcatgctcaacaccaatgacccagtcgagcggctcatgttcaccgtatcaaagctctgtcagttattcctatacataagatctccaccaaacctcccagaccaagcagcaatcgaatcatggatcagagccggcctcgagtacgacatcgaaatttcccaatggacacagaccctaccagaccgctggctcccactagtcgtctactcagcacagggcgagctcctactaacatacaaccgcctctccaacgtcgtgatctggaactactaccgcgcagtgcgcgtgatggtccagcatcttctcctcggcctaaacactacacttatctccatcaaggcagcgaacaaacaattctccgattccccgaattccagttccggaccagagtccgaacccgttctcgacgagtcagctctaaaagccgtcatccgcgaaatgaccacagacgtctgtcgcagcatccccttcgcgctggctgacgtcgactccctcggccgcccgaataaatcagatagcgcgtggaaaatgcgcgccgcgcagggctacggcttgctctggcccctctggtatattctctcctctggtttgccgaccccggcacagggggagcagatccgcactgtgctgtcgcgtgtcgggtctacgcagggcattaaattggcgttggttcttgctcgtgaggcggagcgcatgcgtggagagcaggaggacgcgcagggtgaaattcttggttgggatttaccccgtggtgcgtacgatctcgataactaaacttgatgcgtgtgatttgagtgccgattgcgcgggatctgagagctatgctgtaccactatgacttgaaatgaaaaaaggctcttgggagaatttcagtcactgaatgctctgctaaacgcataacggcaccagaccagcaccagatcgtctgaatacggctgggtagacttggagccagtcgcatgttatacatggaaaagtcgttttacacattttagaccttttttcaccgcagatattttctatattctgcggctgttgattttcatatttctctataacactcgtacaaaaaaaaaacataaagatcctcccaaatctcttctggagaccaaatggatcagtttattcaacctcgtattattgtctagtactagtggcatctcagaatcaatataaacattagaactacgagtgtattcagtctacagaaaacacgttctcctcttccgactcttcgtcacccgactgcggcaaaaaccctttcctaagcagtgctgccttcatccgactgtaatcctccgtggcgcgagcgatgatggctgcaaggtcgttgtaggtatcaatggcatggcctttatccttcatacggtacacctcggggtcttcaagaggcgagttgtaccaggtcgtgttgaatgggagtcccccgttcttgagcttaggaggtgcgtccttagtggcgcccccactgggctttgcgggtccaggttctggcttgcgacgtttaggcgcgtccttggtggtcccccggctgacccttatgggaccaacatttgactttcggcgcttagcgggttgctcttcgtctatatcttgagtagcgggtgtcccgtttgagacggtgcttccgcgcacgcgtgaacttccaatggtaggttgatgtgtcgggggatgtacaatagacacttctacagctgcatgaggagattgttgtggttcacgctcagagggtacgtattcgtcatcaattttttcggggttcgggtgggccacaggtgcagggagatttcgactagtcgacttcgagagctccagggcgatagctatatcctttgcgctgtagtatgtgcaaagcaatggattcgagggctcgcgttcagccacggctgcgataacccacgcgggcacattcggagatacatcaggacctgttcgcacatcagtattatcgtacttcgtccacagtatagagtacaacgtacgaaatgaatattggtagggtcttcgaaaaaatacacaactagcacatgcccacatccattgtgcgttggtgttcgcgaaaactatccgacaatgcatgaattgacccttgccatgggcgcagcgcgtacatttgtgatccgctggggcttcgagaccacacaactgcccctgcgctgcacgccgatacaaagtagatatcaacggcctgggctggctatttttccaatctagttcggtccgctcggggtgcaaatcgcggattttccgttcggctgccgttagaaaatttcgtagcataggcaatccggcagtgtctaggcccgggtagtgagcttaacaaccctattagcgaatgcgcgtgcttgcagggccgaaaaagaatggatatagtgctcacggtcctcgacttgcgctttgatggtagcgtcgagctcggcggccgtacgggctcgaaccgacgggccagggtcttccttctgagcagcgggcttacgcgtcatcgtcgcgacatcagtcccatattcgccgttcgtctggtatggataatcagtcgcatcgtcgtcactactgtcagattcggaggcttgtaggggattggaagagattggagaactgtcggagctttttattattgcctgagcgagattgttggtaagcatgctgtcttgaagtgcgattgaccctcgagagttgcgcttgaagcgaatctcgcgacccatagctatcgtctggactcgtagcagacgtgttgaaagggcttttgtttcctttttggtgaacagctcggaattgaaatcgtccagcacttctcagctctcacagttcaggaacttggaaggaacgtaaaaagagaccatatgatccccttctaatcccaaaaggtttagtttgtggttgagtatcaggtaactatgttgtacgtcattgaggctgaatgcgggtagacacctgataaacaaggtatctgtctcaactagataactataaccgcattgatccaggtagttaattcaagggctttatatcctcttactctcttgttttccgggatctccttgtagttgtagtcctcggggataagtataagaggcattcctctgtatcagctgtaagctcagataagcgaagctagggatctccggctaagtcggcttgttgtataccactgtagcaccggacttggccggatatcattgacgtcatttatataggaccatggcgaatgcccttgaatatcagttgatttgcagaatatgcagaaaatcaatcgaggtcaataaaagacagtaaatcaacaacagtgcacctggaggtgtatggagtagacgaagataccaaaaaaggaaaaaaactcgggaggtgcggagataagcacaggcccactgacgacatactccgtagtttcttccaaggtacaaagattggaagcattcggactttgcttcttacacctctcccctcttctttacagtatacaccatgaccacacaagaacgtaggcttccctttgggaagatcgagcccaattcgctcaagtactttgccagctgtgcactgggcggagtcatcggtatgtccaagctccccatcccaccaaggcacgcactaacaatattactctagcttgtggtaggtgacagctctccaatttgcaactaactcactcaattgacacccaattccatataggacctacccacacagctgtcacacctctcgacctcgtaaaatgccgtcgccaggttgatcccaagatctacacctccaacatccaagcatggaagactatcttctccaaagaaggcctccacggcgtcttcttcggttggtccccgaccttcctgggctactccatgcagggtgctggaaagtacggtctgtacgagtacttcaagtacatctacggaaaccagatgttcccgcatgccaaccccactttggtcttcctcggtgccagtgccactgctgaattctttgctgatatggccctgtgccctatggaagctatcaaggtccgcatgcagactacgctgccacctttcgcctccagtatgcgtgagggctggggtaagatcgtcaccaaggagggttatgctggtttgtacaagggattgtaccctctgtgggccagacagatcccttataccatgaccaagtttgccaccttcgaggagactgtcaagctcatctaccgcaccatgggtaagcccaaggaagagtacagtcaattacaacagactggtgtcagcttcttgggtggttacattgctggaatcttctgtgctcttgttagccatccagcagatgtcatggtcagcaaattgaatgctgatcgtaaaggtgagttttttctttttcttttttttcagccgtcttgatgtatgctaactgcccgtgtagccggtgaaggtgcgatgacagctgtgtcccggatctacgggaaaatcggcttccccgggctatggaacggtttgcctgttcgtattgtgatgctgggaactttgaccggtttccaatggctcatgtaagtgtttgctccgttctaatttgcgtgcacagcgatgctaacatccttcagctacgactctttcaaggtgttccttggacttcccaccactggaggtcactagatagtcatggtccttaggtagtcatggttcttggaggttcttttttctagagaaatagtgtatatagcaaggagttaaatggataaacattgataaaaccatattgtgtagaccgccttcgatatcggggcagaataatgttggaggtcatcgcattgttgccgacgacgtttggcactcctcagtcgggtcaccatttcagtcaatcgtactcactctcgtcaccaacgattaatcaacgactgatataggcatactatatcccgctgtctatcatctgagcatttgcctcccttgtatattccacatcacccccttcacatcgtgcttcgagctctgaccaagaagctcaaactaccgtgtccagctccacacacaaataccgacctcctcgctcttcaccaaaatggaagcctcccgccaaccctcctccatcccgccagccaatccccccagcgtggaaatcgcctacaagcgcaagtgcatagcgctgaagaagcgcctcgccgaagtcgaagccgagaatgaaatcatgcgcacccgcaaccgccgcggctcccaatacatccagaaaatgcgcttggaaacctgcatgctcctcgaacgtctaacaaaggtcaccggcatggccgacgaggcaaagacaggcaccgcaaacccagaactgcgtgcccgcgccgcagccatgatgaatcctgcacatggggccggtgtgcttctggaagacgatacggagggtagctccgatgagcagccgcgcacagtacgtatctgcataatccacaaatcttaagaaacctatacagacccactgcccggcctatactctcctccctccgtctgtctgcctgatccaagctaactgtgttctttctttatattggatagcccgaggaacgcccgctacgcgttaagcgctcccgcaagtccaacgccaccggcatcgatggcctggacgatgatctccccgctcacgatggacatcccgaatctgtagatcccgctgctgctgcccttccccgtcttgcgccggctccgacacaggagtctcttactcattccttccgtgtgcagacgggcagtggtggctctgcggaacagactcctgttgctgctgaggctggtcctgaggctgtgactacgccgatggatgtggatagggaggaggttaaggagcctaaggttgagcaggcttagtgggtggcttgggtcttgtcgtgtattttctttaattcctttctgggctttgcatagcccggactgagactccgtttttgttttcatttgagggttttatgcatcgggttctgatgcggtgccggtttactttgctaggttttttctttttttttcgttcctttggtgggccttaattgggcctttccactactatacggtctcctggtgtctatgtctgatatgaaattcgtctgagaaatcatgctgaaagcatggatgaagtaattggttcctccttgggcttttgatgtcgctcatttagactaccaagtctgttatggtcactgctagtcaagtcagtgcatagaagcagacagagtaagggaagtggaagagagagcaggctagtggcaatcaaaaggtggatttctgtagttttagggcacggctcaacatcattgtgatattcgggcatcatagcgctgataggacgtacgaactacgaacacttagttccatttccaaagttggaaaacgtctctgaacttatttcgcaaaggcccatagcgattcgattcgattgattgacaccatctgtacagtaatcacaacgccgttttccccgtcacagaaccaacgtcaactccaataccagtaagaaagacagcacactattggaaacaagaatgggatgattatctgggtatgaatgtcctctgtcatgtacaggtgaagacataacgagtttggaaaaatgatacagattgcaagggttgatggtcaggaagattagacgcgggtgtgttttatgttaggtgcttccccctggcaggcggtgttcctggctcggctgtcgatgtagagtcgtattggattgtatgaaaaggcacataagcatataaaagcctaatactcgtagcacaattgattggtcgagacaagcgtcgactagtctactccagcgtagagatcgacgacaatgttgattccagccacgagaatctctgcggcgatcaagacaatgactgatattcgttagctaggttgttgttagaaatcacaactctgggagacttaccaatccattcgagatattcgccatggcgatgtgtcaattgatcctttaggactgcaagcagatccgcaatgacatccagacgttccgtcagcagactaacacgctgatccatctccaggtagcttcggactgcctggtagacaggttccaactgcggctctgcccagaagagctcagggctatcgaggacagacccttgcaagtgaatattgatgcggagaatgaagagctctccaatctgcatattgatttgccgacgggtgagattgacgctaccggtttgcgcaatctgggcaggtagcggtgcagtgtcggtaattgtttctgacacaagatcttcgaaaagcgaggtcttgaccgattgggccagagcatgagagatcgccagcttgaccatgttgttgcgcggatcgcgaagagagatgaagtcgttgtagatcctagcctgatactcgcgcgcatagtagaaattgaagttctcaatctgcgtgtcatcgggactcaatatggaggttgcaaatttggagatatcggataagaatcttgattcttgcgcgggcgtcattccccatattacaaccgttccgtagtcaaagaggaatacctcgggtgtgtggattgtggtgtcaataccaggagtgtctttggcgactacctggtcggcatcattcgagtgaccgcgctcgtcgtgcagatcaatcaagtcctctcttctggtcttcttattgtcttcaacctccaccgcactatccgagtatcttctttcactgggtcgtctctcatgatgtccattgccatttggatctaataaccgtgcgttctgcttttcctcgtactcataatcaaaaggagagtacacgcattcatcatacagcttgggattggctccgcgagtcttgctccgcgatttgaggaacttgataacgccctcaagtcgatatgaattggccgtgcagtaagctgtcactcgaggtatgcgatcgcggtcggctttacccaatcgtgcagcatggcttcgtgcggcagggtccttgatgcgagttatttgtgaatagacatcccgagggaaatctccttcagacccttcttccccctcttccgtgacagggtccggcaacagttttagtttttgtgcttttttggttgtccgctgcggtccaattttagatgccgcatgtggtgtgttcgatacgttagagggagccccatgactattgcgacgacgaagcttgctgtttaatgccgagagcatgggctggctgccaggacggggctgggcgttgacattctgcacaggaggtgagcctgtttgcaacggccgaaatgttggatcggaggtagaggcagtgccataagtgctgatttgtgtgagcggattgaaggataccgaccgcgatgtccggtttgcccgtggtgacgtatttgaggccgagttctgcggcagcagaggagaattctcagcgtcagacgccatggcaaaagagataaaaggtgtagagttatacgccgtgtgccattgacgaatggaattggagctagagaagcaaaaagtgatgaggaaaaagttagaggaagctggcaacgttgagaagctaaagatgtccaccttaataatctgagaatctgcccgagtccggtccttggcgcttttgtatcatttcaatttcgacgcttctctgtatatttcgaggtttcgacagttctatctttatatcttttggaaagactttattgccagacattattagacatgattgactgaattctatatacataaccccccaaagttgaattgcagaccaggtcttactcccaacaccatgcaaccctagtaacacttgcacaaaaatccttttcaatgatcgatcacaaaatggctgcagtagacgcggggttggttgcatgtccaatcgacaccgactttcgattcgcgccaatcgggcatcgaaaccccccgaaaggaacatcagtcgatgcaagtgagcatgtcccccgttggcattgccaggtcgtagatgtaacttccagctatgtttgaagatatgtgacactgaacaaaactcgcttttgatggccgtagaccattttcaatttcaccgacgaacaaatccagaagggccgcctgccttctgtcggagcccattgccctgagctatggtacgggtcttctgaagcatgctactcttgaggttccgtccggccttggagatcttaggggccagcgcgggctttgtggacttctttgacgatggcgcatccagcacccggatagagacatctcccaggttgatatccttgggaatcttgtcctgcttgtctaggaatcgcaacttatttgacttttgaggcatggcaaattgatcttcagccgggggtgtaggagggcgaatggcgaactcagcattcaagatgtcatcgggaagcaaagcaggaagcgcggctcgtcgtgcatcttgggtagttgtgccttggagagtagcggtgctttcggaacgcatgtcatcggttggagactccttgggcttgacaatcgatttagcttgcaacttacgacgctcatcgagtttccgtcgcttctctctcttcagttgctcttctctgtgaaaaatcattagtcaacatcaactttaccaaatgaaaatcacacgtacaattgcttggaagcttcttgcttcttagcctgctccttcattttcaatagctgggcagagttatcaatggtctctggcgcatcatcgtcactatcgtcttcgtcgtcgtcaccctgtgtaggtgtttccgaaatctcttctggctgtgtttcgagtgtttcaggttcctcgctaccaaatcgaatcttcttgcccgcaggtgctttatccccaattacgatagatttctctgggatatgtttcgtagcatctgcggttccagtagccttcggatcgcttcttcttctccgcttggtctgctggtcttcggtcttgctagcacttgctgactgcgccttgcgctttccactcgcaacttcggtcgcaacatttgcgcgtcgggtagctgtcgccatcttggaattggtggcagaggtgccggcggattggggctcttcttcttcgggctgtcgcgtaaatagacccttggcagcagtgaccaagtgagcaaacatagagtaagaaggaaattgagaaataaagcaagaaacccaaatgggggatacggctcctcgtgttggataagaagtgaagcaaaaataaaaaatctctcggcgatcaagatttcccgagagcggagacgataagcaactctttgctatcacttctcttcgtctacttcaccttcacttggtgggcaagtagagtatcttcttttaaattaattaaatcctctttgtctagtcttgaatatcaagttcaagcttctctaaacatcaattggtgctaaaaatctgcgcaaacagcggatttgctctacaaagtcaaaaatatatatatcggtgtcggtgtccaacaagcactgccaaacccaacgtatattatcgcatgaaaacacaatttacctgacatttattgcttggattttgccagatagaacccagtgagcacgaaccaagcaatttgagctatttgttgcaagtcatctacagagtcatacttttctctgctgtctaccccaaaactcaagaaagaaaatatctaaaaatgacttctaaaatattactatcgagccaacggatcatgtcgtttccaactacataggcggacgattcttgacacgtaacatatatgcaatgaagcataacctctatatactgattacggcaaggctgccgggataaagcttatgtcaaaagtaatcctttacccccgctcaagggaccaaggcgtgttgaaatggatatggcatgaaccttgaatattgtacaaccagatgcaaatgataccaccctgtgtgtagactccatcgaaagataagaacgctgtatatagccccaagttgaacgcctagaccgtaaaaaactcctggaaatcattactcattgataccgtagaggttcttataaaactcctcgtgcttgcgaaaacactcggcgcgttctaaagcctcctcacgagaccggataaagtcgtcctccccaatggggctgagctcctcccacatctgattatattcgtcttgatcactgccagtcatggcccacatgctctcgcgctgacgcttgttgcgctcccggtcttcctcgatgcgctgctcgatctgcttcttgtcaaggcgcagttggggcttctcagacttcgacttgctgcctccctcggggccttcctcatgttcaagatccaggtgggagggatgggaatcgcggtctttcagagccgcgtcgatctcggccacggtttcggcgctgaggacttccttcgctcggagaccgttcaagacgtgacggacgtgcttgacattggctgcgccagtgccatcgggaggaacgaccgagtcgaccacgcgcaaaatgtctcgttgcatcatgcgcacgtatgggaggtagttttccttgatggccatttcgcagaggtgttcaataaagtacatgatgttcgcacgattgttcatgttgttctgccacatgtaaagtcagaatagatcaacacacaatgaaatcggagctcttacccgctcaagctgctccaggatgcatgagtgaagatcctcatcgaggtcacggtacttcagcgcataatgcgcagccttctgcgatgatgtcacagcagcactgaggtgctgcagctgtgtagtgaagcgcatgcgcacctcaaaaggatcgatcatcattttatcttccggtgttatggcttcctcaagggtaggaagatcagtagccgtaccggtagagatgagagcggtcagttttaaaaagccgacagaaatatgtggggtcagaaaggcggtggggcgaagccgcaattttatttcgataacctgctacgtactccatacataacgtagcgacttctctggcatcatttgaagtgaatattcgtgaacattgtaacaaaatcaagatacaccgagcaatatggtagcaaatatcatcaaagggaatcccgcctcagcgaactaccaagactagatgtatcattcccatcaagcaaaccaacctcttcagcctcattacgattttcgaaatcctggtattcttcgtctcgaagggcttcttctcggcggatttccacgccattcagcactgaccaaacatctttcttggtcagtagtccttgtagaatacccttgttggcaaataacacataacgcaagccaaggcgctggaacattttcaaaacaatcaaaaaggtgatgttactgttcaatgtcatcggtgtctgatccatccaaggtcgtagatcaagggtatcactagggtctgcaaaaggttgatgcgaaaagaagacctgtgtctcgtcggagaggttgcgggctgtaccagaggtcgagtatttcagcgcaaaagaaatctcattgcgggtgatgtagcctagaaggacgggactcgacgtgtctgatactatggggaatccgcgatatgtagtgttagctaggaggttgcggatcgaggcaatagtatgaccggtggcagtaatgatgctgatatcgtccacggttgtcatgacccggttggcagatacgtctggcggagtggtgtcatcacgatgatcgaggaaaggatactcgtttagtcgaatccatgactcgtagatacctcgcttcccgaagatgtcaccacaccacttggacagcatcacagcaatcatgatcgggatgacgtaggtcagcgcgccggtcaattcgaacatgataacgacaattgacaaagtcattcgagtagcaccaccaagagcagcagcagccccgataattgcgtataagccaggtgtgacacatggaatgtctggctcgcacctgctaaacaggaatgcttgcggataagattcttgccacaagcgaactataatgcccagagcacgcccgtaaagagcaccgatagcgaccgaaggaaggatgatacccgcaggaatctcaagtccaaatgtcaaggaagccaagaaaaaggcaagtaaagcagcaacgaccaggtagattgccacgccgattgaggcagatcccgtggcgcagagaccaaatcgatcatatgtcacactgttgcactcggcgaacagcgactggacaagctccgagttctgagcccgcatgaagtgatttggatagttgatcaaagctgtaatgagagccacgacaaccacttcgatgattggtcgagaggaagtccgagctcgcctccatttggtgactttagtattcaggcggatgaggaatgcaccgtagaggccgccaatgatgccaagaataatgaacgggatgatctcaaagcggtgccagcctcgagtgtaggtgacttgatacagcacaattttacctgtccggaatgggttcaaggcttgcaaagtgacagctgcgaccatggcacagacaaagctttgccacattgtcttgtcgggaaaataatatgaaagttgctagaataatcagcaaagtatataggacaagattgaaaatggctcatacctccaaactaaaaagaacacctccgatgggtgccccgaatgcgactgatatacctgctgcagcagccgcagaaagaacctctcgtttgcgtgctgtgaaatgagtaaatgcgcagagggaaatatagaattaatcacgtaccttcattgcctttcaggctttcaaaaggtttcatcaggatattcgcgcaacagcatgcaacatgcacaagtgggccctctttacctagccatagaccggaagccacagaaagacactgatcgttgtcagcaaaaatgccttataacaagaagaagcttgactcaccaggcccagtgatttaatggcaagtgtccatggtcccatgaaatgtcggatgacagttccaccgaggatcgtttttatctcggggattccactgtgtctagcataaacggcataatttcgcaccaagaagcaagcacatgcagcaaagaaaacctagatatgtactgtcaatagagccctaaaggtaagagacagagacatcattaccgaaaatgaaacataaaagacatatccaaccgtatatgcccctccactggactttgcgcctaatgcatttccccaaggtgtccagtctaaacacttagattgatctataccaaatccagattcagtagtgagacttgtagagatttgacgccatcggcttaccatcgagaccccagcagcaaaagctcttgttgagataaaacttgccacctccacttccatttttgcaatatccggacttcaggtcacctagccaatccgttgcaatatcgatagaagcagcgattattcctacagcaatgcctgtcgcaatcaacactaaccagacattgcttgcgtcaagcagtcgacgagcatggcccaatagaccctgtccactcgagtaaagaagccgtttcctttgccgctccttggtatactcgtagatccaatcgatagcagtgaagtcgtcgtagcccacacgtcgtcctgggccttccacgtaccagtccaatggcgcgccatcttttgaggcttcagcaccactattgagccctatcggcgcgtaaggatcgagtggcgatgcatcgccgttctgaccaccttgcggcgccggagagccaaagccagtatccgatccgccggagggaggggagagaaggttagatagactgaaccgtgatcgttgtttttgttttcgcttgaaggagatcctaaataaataacctgatcagcgccgtagcgaaaggtggaggctccaaggcatacggctcatgtaacctctcggcttcccgattcacttcttgaggctgaaggatgtcttgatcagatcctagttgcgtcccagattggccctcgccacctgagccctgaccactcattggaattagtataacataaatgaaccgcgatatcgcgatatcagcatctcctcttaaaaacgaccttgtttcaaggacagctttgttggacgcgcaagtgtggcgcaagctccgcgatcaaaagcggtggggctcaggtctaggcggggctgcgccacaggcggcagaaagaaaaaaaagttggagcgaaagccgatgaagcgggatttcctcttttattacaaacttcacagtttctctcacgaccggattaaacatggatcggaggccggtctatgaggggactcttactgagtctgaacttctcgagcagcttccgagtggaatctcgactttcattcggactgcatcggggacgcaacacctccacgctcttgcgcttggcgcattaaacaacgaatttacagagagcattttcagactatacgaaccgattttcgtcgatcttgcagctagatggcttcaatcggatttacatgccgactacattcatgtattagcggcattcgcgcagattttaccatttgcgccgcacctgcgctcgcttgccagtcaatatgcctcatcacagactggacctttggtggctttggccgtgtcgaaggaattaacactgctacaattggatcaagttagcattagacttctactcctcgccctcttccgacttctttcatttgatcttgaaaccttctctcccatcatttcaccgcttcaactgcagtccctcttccaatcccaagatcgagtaacacgataccttgctgtacgatgctttgccttatatatgcacgcagccgatgcggcaaccgaaaagatggtccgcgtcaataccgggactgagcctatagaaggagagtgggaaggcactctgatcgattaccgtgtgctaggattgtgggaagaacgccgatgggagactcttgggggaattattcgggccgagaggacttccaggacggaaaacaacaccctggcgttgatcgagaggacacgggactctttcacaaccaagaccgcagaaatctgcggtgttttgattcccaggttgaaagatacacccgcggctccttcgtctgtcgtcaagactactaccacagttgaaaatctgcgccgaattgcagggtcattactcggttacaaacccatcctgctggtcggtttgcccaactccgggaagacctctttgattaatgatattgctgccacgatgggccagattgaaactatggtcacacttcacttgaacgaacagacagatgcgaagagtctgcttggaatgtatgccacttcatctgcctccggatcattttcttggcagcctggtgtattgaccaaggctgcacgcgaaggtcgctgggtgttgattgaagaccttgatcgtgctccatctgaagtaatgggcctcattctcccgatcattgagaggggcgagctcactatcccgagcaggagggagcgaatcaagtgtgccgagggcttcaaaatcatcgcaaccatgaagtcatcgtacaacattgccggcgaggagatcgcaccgagcaattcaatgctcggaagcagactctgggagagagtgcaagtcaagtctcttcccgtggatgagatgcgtgatgtcatcctgcaaaagttctctttgcttgagtctcgtgtgccaactctcatgaacgtctacggacgagtatgctctgcattccatggaagtcttgcgatcaagggctctcaaggccgtaccccgggcttccgcgatttgatcaagttgtgcaaccgtctgcacaatcgcctacaccgcataggtgcgaagactggctatgagcccacgtcagaaggtaccgaggatgaaatattcctcgacattgttgacgtgttcctccggtatctgcccgagaagtcaatgcaaagcactctcgccgccgttgtggccgaagcgcttcaaatttctccccagcgagcgcaatattgtctcaatgaacgcaccccctcttatatcgacaagaacaacagccttgttcttggcagagaaacctgtaacaagatcaaagtaccaagtggatctgcattgaagcttgccgcagcagcttcacgatttgcccccacccgagcggcattaaccctcatggaacaggtagctgcctcaatccagatggcagagcctgttttacttgttggagaaactggtatcggaaagaccacggtcatccagcatcttgcatctttgatgcgtcagaaactcacagtagtaaatttgtcacaacagagtgaaagcactgatctgctgggtggtttcaaacccgtcaacatccgtacaatggcagttccaatgctcgatgaattcactcagctctttgaactgactttctcggccaaaaagaaccagaagttcttgtcgtccatatcgaagagtgccgcgtcttccaattgggtacgattggtgaccttgtggcacgaagccgttcgtcttgcaaatggagtgttcaatccctcgaatgccacaggggagaatggcgatgaacagccagccaaaaaacggaagctggattctcccaaataccagcacttgcggcaaagatgggagagcttcgcaacacagctcggagatttcgaggctcaggtctcacaaggtgatgccaaatttgcctttgcctttgtccaaggtaagattgtgagagccctacgaaacggcgaatgggtcctcctggatgaagtgaacttggcttcccctgatacccttgagaatattgccagtcttctgcaccacggaagtgagggaacgccatctgttctcctctccgaggctggcgatgttgagagagtcttcggccacccggaattccgtatcttcggtgctatgaaccctgcaacagatgctggaaagagagaccttccccccggtttgcgttctcggttcaccgaattctacgtacactcacccgatagcgacttggatgatttattggctttgatccagaaataccttggtgatttgacaatcagtgaccagcgtgccgtgccagacctcgcacagctttacatggtgaccaagaagctcagcaacgagaacaagcttactgatggagctggacagcgacctcatttcagtatccgtactcttgtgcgggccttgatctatgtcatcgaccacgcacatgtctacgggctacgcagggcaatgtttgagggttttagtatgagtttcttgaccgtgctgagcttggtctccgaacgggctttgatacctctacttgagcttcatatctttgggaacgcgaagaacgccaagtctcttctcggacagaccccccgcccaccaactgatggcaatgattatgtgcaattcaaacattactggatgcgccgcggtcctatgctcccggaggagcagccacactacattatcaccccattcattgagaagaatctgaagaacttagtccgggctagttcaactcggcgattccccgttctgctccagggtccgacatcagccggaaagacgagtatgatcgagtatctggcaaaggtgtctggaaacaaatttgtacgaattaacaatcacgagcatacagatctgcaagagtacctagggtcttacatctcgtcagacgatggaagcctgcgttatcaagagggtgtgttggtggaggcgctgcggaacggttattggattgtgctggatgagctgaatctagcgccttctgatgttcttgaagcccttaaccgactcctcgatgataatcgtgagcttttcattcccgaaactcaagaagttgtccacccgcatccgaacttcatgctgtttgccacgcaaaatcccgctggtctgtacggtggccgaaaggtcctatcccgtgccttcaggaaccgtttcctcgagctgcacttcgatgacattccagaaagcgagctggaatttattctgaaagaacgttctcagatcgctccctccttctgcacgcggattgttgaagtttaccggaaattgtccttgctgcgtcagtctaatcgactctttgagcaaaagaacagttttgccactctgcgtgatcttttccgatgggctcttcgtgatgccgatgatcgcgagcagctagcagtcaacggttatatgcttctcggcgagcgtgttcgaaatccccaagagaaagccgccgtcaaaaccgtgatcgaggaagtgatgaaggtaaaactggacgaggatactttgtatagctctgcagagctggaaaagaatgctcctgagatgagcgagcttccaattggtattgtgtggactaaagccatgagacgtctattcattctcgtttcgaaggccctcaagaacaacgaaccagtccttcttgtcggagaaaccggttgcggtaagacccagctatgccaggccgtcgctgaagctttccgacgcgagttgttcattgtcaacgctcatgtcaatttggagaccggcgacttgattggtgctcaacggcctatccgaaaccgggctgctatcgagaaacagcttgtagatgaccttcaaattctccttcacgggcagctgagcggcgcgtctttcgatgacttgaagcaggaattcacagcattgaccgcggagcagcgccaagccaaggatcagcttctcttgaagaagattgagaagaacgctattcgctgcaatgccctgtttgaatggtccgacggaagcctgattaccgccatgaagaccggtcaattcttccttcttgacgagatttctctcgcggatgactccgttcttgaaagactcaacagtgttctggaacctgctaggtcgattcttctcgctgagaagggccccgttgattcaatggttgtggcagatggtggattccaattcttatccactatgaaccccggaggtgattacggaaaacgtgagctttcggctgctcttcgcaaccgcatgacagaaatctgggcacctcagctgtctgaagatgaggacatcttgccgatcctctcacagagattggatctgaaggatgagagcgtcgcaacggctatgctgcgattcgccaagtggtttaaagtaaccttccagaactcctctgccacatcgctctcgattcgtgatcttcttgcctgggttgactttgtcaatacttgtcaaagagcagacaccccatttgctatcgtacaaggtgctgcgatggtcttcgtcgacaccttgggtgcgaaccctgccgcaatgcttgccatttccctcaacaatcttgagggcaaccgcaagtcatgtctcgacaagctgagcgaactgttcaatgtcgatgcttccaagatctactgggaatcgaccaccgtctccgcggaacccggcgttctgcgcgtcggaccatttgctctacctacggctggtacagcagaccccgatcctcaattcacaatggatgccccaactacaatcgccaactctgtgagaattgctcggggtttgcagtcatcgaagcctatccttatggaaggaagcccaggtgtgggtaagactacacttgtgacggctctggccagagctcttggcaaacctctcactcgaatcaacctctcggaacagacagatcttacagacctattcggttcagacgttccagtggaaggaggagatgtcgggcaattcacttggcgtgacgctccattcctacgagccatgcagcgtggtgactgggttctgctcgatgaaatgaacctggcctcgcaatctgtccttgaaggtctcaactcttgtctcgatcatcgccagcaggtttatatcgctgagctggaccagacattcaagagacaccccgatttcgttctctttgccgctcaaaaccctcaccatcagggtggtggcagaaagggtctccctgcatcttttgtcaaccgatttacagtggtctatgcagacagcttcactgacgatgacttgaaaacgatttgttccagacttttccctggcagtccctctgtgcagaccgagagattggttgatttcatttccctcttgaaccaagcgatcacacgagatcgtcggctgggaaccatcggtgggccatgggaagtcaatctgcgtgatatccagcgatggcttcaacttgccgatcgaggaaacctacagatccagacaaagcacttccttaatgtcgttatcagccagcgattcagaagcgaagaggatcgtaacgtggtctctcagatttatgaccgtgttttcacagactctgatactggctcggagagctacttccacaacctcacacctgaatacttgcaagtcggtctgggcgttttgacccgtgaccctctgctgcagcgcttggccgaaccaaacatgaggattctaccaaatgatcttcatattgccgagtcgctcattttgtgtatcgataactcctggccgagcatcttagttggtcctgctgggtgtggcaagactactctcatcagaaagctggcagcggtcaacggtgcaaaccttgtcgagctagctttgagttctgatactgatactatggatctaattggtggattcgaacaaatcgatcatcgcagagaggtttcaggctttgtccatgatattgagatgttcttgcgaaaccagctcatccaatgctttgcttcaggggatgtatctgatgttgtgatttctgcactccaaatttgcgagcatttccagtctgcagatatctcgctggaaaatgtcatcccctcgctttccagcctttgccagtcttcttccgaccctgtctaccaacaattcctcgagagagcccaaaccttgttaaatgcaatccaacaatccgataaaatgaaggttggatttgaatggacagaaggtgtcctcactcaggctgttcaacatggaaattgggttattcttgacaatgctaacctgtgcaacccatccgtcctcgatcgactgaattcgttgacggaaccgaatggcacactcattctcaatgagcaacggacagacgatggatctgccaaggttatcacgccccatgtcaactttagaatcttcttgacaatggacccccgcaatggcgagctgtctcgtgccatgaggaaccgttgtaccgaaatctgtttcttgccaagtgagatgcaagacatccaacctaccataggcccatcttacacctgtgaatcgttcctctatcgacttcgccatatttggaacttggatacctccttgccatcgtctgcctttgaagacgctctcgaggtgtgcttggatcatctttcaccagcggatctggcctaccttcaacagtcaccaagcaaccgtgtggctatcaactccgagcacaacggagaagacaagccatccaatgttctgcagcgctatacctctctgttccatgacaacaaccaatggaagccgcttgacatcgccagcggcgagattgtgcttggtggggcccaccttggtatccgaggaatgttgcagcctcttcacccgcttacaaatgagcctctgatagctattgcaggaaccagtgatttccggtctagtttgattgtcttggcttatcttcaggagctgagacttgatattcatcgcctcagggaaggtttgattcaagccgacgtatccggaaaagagctcaagcctagccaaatgacacgtttggagcggtcattggcatctgagcggatccctgcgttgatgaaagacacaacgcaacctgttgcctcgttcttgtctgattgtggccaggctctgtatgattacattcagtcgttggatcaaatctctctccaaggccctgtaataatcgcagcccttcggaccgttatctgtctatgctgggacatttacagagccacagaggttagtcaggttgatgaaggagaattccaagtctaccttcagatgggccgaaagatctgcgggtcgttgctcgactcgtcccctcttctcaacccgctccaagtcgctttatcacaggccctggatcgattccaggaagggtgggctttgacgactggtcttagcatgcaaagaatctgggattcttggagacatgtcactcctatctctcaagataagttgaattctctaaccgagttggagtcaacagtctttgatttcacaactttggctttgcaaacccgtgtggaattgtctcaattgagtcgtgtgcgcaactcattgattgatgcccagcgattcattcttctggatggtgctgatggtgacgtacttgttcaggtattttagatctgctgccaaacccgaagaattatatatgctaactatgaatagggtatcaaacaaaccgtcgctgagctatctcatgcagttcgacgttcagagtcaaccgagtatccatactttgcaaacgatttcgaagctctttgccagtaccacgacatctcctcatttttccagaacccagtccacgatactgtcatccagacagtcctgccactcctcgctggtcgtgcggctcgtccattagacacgtcgaatttccaaagcgacgtgccaaatattctccatagaatctcgctatttgcgggttcttcaagcaaatccgagtctgcgcttgctactggtggtattatttctctgtcgctattggataagctggcaactatcggcaatacaaaattggggcagatggacatgcttgaggcagagaaacaggctctctccaaggctatttccttgagcagtcaacagatcacaacagaccagtccatggtccttggacgtactatcgctaagctcacagccgagctggtggcttgtcatcgggagttcttcgagcctcgctcagccgaggatctcatctctgttctgcaagcgatccaaaatggggatctttgcgttgaacagtcacctatcaaggttgaactagaccaaagcttgccaaatgctctcttctttaggcccctcgccgaacaggctctaccggctctgatttcgtccctccaagcatcaagccagcagcagagcattcgaaccactggactggcagcagtacagctagcagtcattcttctgcgtctattcgtccccgacaagacatttgacccttctctcggtctcgttgttcaacgcaaacgccactctcaacgtctgcaagaatacacggccaagtctgcagcaattcttgcctttgagaagtctttcaccaaccaggtttccaacctccggtctgaacttctgcacaatgaaatccgtgatctaggttctgccccccctccttcactggtaaaccggccccagcagtcccagttgagtctcttgcagggagagttcgtcaatttaatcaacactgtcctgaagagagacccggagcaaatggtccgctctgccgaatcttcgcagtcccaagacatgatccagcttctgcgtaataacatcaaacaattgagcagtcgtcttagcactcactacagatcctatgacgatataaccgtgcccgtggttcgtttcttgcagcttttggaccttggtgtgttcttggcgtctagccagccggaacagtctggcgatattcctgatattcagtctctgagcgcgcgaacaccctttttaggaggtatccaccaccccgttcttgctcaggatgatcggaaggcccctggcaccctgaagaatgcaaacgaaatgcgccttcaagaactgtcggccctttgggccgccaaggatgcggattccacaatcttgaatacaaaggctggacgagatattattcgccgtgttttcgctgatttccatcaactatggaagactaagctcgaagaagatcgggagctagaagccgaaaagggagaattgtaccgcttcaagggatcctgggaagaggaagaagaagtcaacgaagccgagctacatgcacttttccctacattcgatgaaggatcagctgaagacacagaaacgacggatgctgctgaccgtattgaccccaagagcatcgctctccggcttgcctcgcttcatgcaaatatcgtctcgaatgagcgcagtggaactgcattgactacccttgtcaagcaatcagggcatcttttgggctcaatctggtctgaaaacaagacatcattctcgcctatgtcaccccagaaccatcttcctgcagttcttctacttctcgatgatgccataggcgagggaaccaacaatcaccaaaagaattacaacttctacaccgattcgaatctcgaagaggcaaggaagctggttgctctcgcgctttctgttcaagcccgctttgcccagatccaaactgcctggcctgaacatgttgtcctcgctgatgtcattcaatgctgcgtgcaaatccttcaattcaagcacactgaacctgttgccaagttcatgaccaaggttgaaaagcttcattcattcgtacatgagtggcagaccgtggccagcagagaatattcagctgttaccgtctacgacgagattacatctattctcattagctggcgccgtcttgagctgtcaacttgggctaagctcttagatatcgagaaagagcgatgcgaggacgaggtaagtgcttggtggttcatcgcctatgaagtactcatcggcgctcccatcatgatggtcgaggcaggcgaacaagacatgaccgaacacacccaaaacttggtcttgactctagagcaattcttcaattctacaactacagggcagtttgctcgccgtctacagcttgttgcaaacttccaagcattgcttgaagttttcaccacagattatccctgcctcaagaagcttgtctctgccttggacaacttcctccaccactacggacccttccagcctggggtggacaagtatctgacggagaagcggtcggttcttgagaaggatatcaaggagcaaattcagcttgcgagctggaaagatgtcaacattgtggctttgaaggaaagcgccagaaggtcgcatgtgaaactattcaagttggttcgaaagtaccgtgcagcccttggccagccagttcaatcaatccttgaagcaggccttccggaaagcacggaggagatcacttccatgtcacaagcagagccggttcgccccactgccacgttccccgaggcaatggccatttgtcaaaatgataaaaagctgtggtccactcgagcgctcagatttcagaagccggatggaacagccaacaacatgatgaatttgtattcttcaattccagccgagttcgacattgcgaaggatctcgacagcttcattgtctccgtgattgaaagtatgaatgagttcaagtccaagacacccaaggtcctgaacgaagacaacaaggacgacgtccagcacctcaaatcccagaaacgccgtctctatgccgagaccctcaaacaactatatgagatgggtgtgaaacgtaatgctggatcgagtgtgattgaaacccaagaaacagttcctcaagttctcgccactagtgccgcctttgaggctggcgctgcaacctcaactgcagttcagagtgccgactggtacttccacagacttctggatctcctgcctaagacccgcctagcgtctcgcaactattccgaggagctaagcaacgtcgaagtccaccgaagcatggggtctattgagcatctcattctcaccgtccgccgccagagaggtgtcatttcgcctgccctcacaggcttgggcaagctgaagtctacgcttgacaaggtgcagaacctttgggcagcgacttcaaactatctgtcgcaagaccatgcttctgcatcggagaagcgaaccaatctagctagaatcgtggcttggctagcgcctattcttggacttgccgcaatgattattggagtgcattccaagttctcgggaattgacgcatctaagattgtggaacagctccgcgccaaaaaggcatccttcgatagcctacgcaagtcgcatgaagctcttcccatgcttcctacgaggattgcgtctaacgcaaaccacgagatcgcgcagcaggcacaatcgtcgctcgatgaattggcggctgacttgaagcaatggagtcaagctcgccctgatctgtccttcgcgctggatcagattacaccttgggtcaagacaaaggttgctgatgtccctgaggttaatgatgagaacagcctatccatccaagccttcgatagcagcctcctgacggccattgacaaaatgctcatcggcctgcagaagctcaaggatgtgccttctgccatcacctttgatggattgctgtcgaggagtgatgagttcttctctcgcggtattaaggctgtccatctcccagagatcaccgccgcattggagaaggtccttgaccaattgcacctcctgcaagatcactccgctggcggtctctccgttgctgccgcactgctcaccagtatcttgcctatcgccaacagatactaccaaatctgccgggatctggctgatcggttcatcgccgttcaccgcgagatctgtaagacatcctacatcctgaccaagactttcaagcaggtcgcctccgaaggcttctgtagtcctgccgaagcctcccaagatcaaggcaaggaaggccagatggaaagtggaactggtctcggtgaaggagaaggagcggaggatatcagcaaagatgttggtgatgacgaagatctatctgagttggcgcaacaagagaacaagaaagaggacggtgatgatgagatggatgattccaaggatgctgtcaacatggatcaggaagagttggaaggtgatgccgaggatcgcaaggacgaggaggaggagaacgacgacagtgccgaggaaggagatgacgatatcgacgaagagacgggaagcgttgatgaccttgaccctggtgctgtggatgaaaagctctgggacggtggtaatgatgagcagcagaaggatactgagaatgaagaaggaaagggccaatcggaggccgagcaacaagctgctgctcaggaagagaagggcgacaaggatgaaaatggtgaagaaaagcaaaaggaaggagaggaagaggaagaggaagaaacagaagatgaagaggcccccgaagacgagggtgaggcagttggacgtgaagaaatggacgtcaccgaccctcaagcaaaggaagaagaaacacttgaacttcccgaggaaatgcaacttgatgatggtgaaggcaaggatgacaatggcgaggacgacgatgacatggatgaccttgacgacgatttcggtcccgcccccgaagaagaagcagaagggaaggacgaagatgtcaatgatgaagccggcgaagaagatgccgaggcagcagaagatcaagtgccaggtgaggaagatgaagaaatggccgatgatgcggaggaaaccaacgaaggcgaagccggagaagaggaggaagaggaagctggtggcgaagatcccgaggagtctgagcaagacgacttcctcgcacagcgtgatgagaatgatgccgcaggtgacaacgtcgctcctagtgaagctgttactggcgggctcggagccgagcaagaccaaaatgaagaaaagggtgcatcgggtgacgctcagcaggagagcggctcgactgatcccagtgccaatgtcgaccaacagacaggcgctgctaaggatagcgaggagagccagcccagccgagacgctgctggcggcgaagatcacgggccagatgaacctcagatgcaggcattcaagaagctcggtgatatcctcgagcaatggcaccgacgacaaaaggagattctcaatccatctcaacaggaagaggaatcccaagctatgccccaagacactgatatggccgacgcggactttgagcacctaaaggatgacgatgatgccgcagacacccaggcccttggacaagcaaacgacgaccaaacgcaagccctcgaccaaagcaagggtgtggagtccgacatcaagcctggcgagaacgatgttctcccagacgtgtcggacgagcagcaagatgccgtggacaaccagcttgaggatgagatggaaatcgaccgcgagaatgttcccacagatggcgagtccgttggcgccttcattcctagcggtcaatcatcccacgatcgcgcagacggagcacaaggcaccgaagaagtggacgaggaactggacgaagttgactcgcaactcgcagcaatccatctctcctcttcgcttcccccattgactccacaagacgaagcccgccgcctctggtcgcactatgagtctgccacaaacgacctctccctctccctgaccgaacaactccgtctcattctcgcccccacaatggccaccaagctccgcggtgacttccgcactggaaagcggctgaacatcaagcgtatcattccctacatcgcatcccagtacaagcgcgacaagatctggatgcgccgctctatcccctcaaagcgtaactaccagatcatgctggccgtcgacgacagcaagtctatgctggaaagtggcagtggtcagctcgcctttgagaccctcgccctcgttgccaagagtctgagcatgctggaagctggtgacttgtgtgttctcggcttcggtgacgaagagcacgttcgtgtcgcccacgaattcggaaagcctttctcctccgaggcaggctcccaggtcttccagcacttcagctaccagcaaactggtaccaatgtgcgcaagctgattgccgactctatcgctctcttccgcgaggctcgctggaagcgctcgcctggttccggctctgccgatctctggcagcttcagttgattatctctgatggtatctgtgaagaccatgataccattcgccgtcttgtcaggcaggcgcttgaggagcgcatcatggttgtctttattatcgtcgatgctgtcaagggtagctccatccttgacctctcgcaggctagctttgaggccgatcctggctctggtggtgagatgaagctcaagatgaagcgatacctcgaggacttccccttcccttactaccttgtcgttcgtgatgtgaaggagttgccctctgttctggccactgcactcaagcagtggttcgccgaagttgtggatgtgtcgtcttgatacccccaaaaataaaaggagttggaatgcggatttagagttatttagttacatttgacggcgttggatgatttttctttgtatatgatagattttatagatgtgatacatcagtcgaatgtacaacaacattttttaatttctttattcaaattcccgtatgtcatttcctacagaatgttatggtatctcaatgctaatgcgcttgacaaaaattcccccaaagtggccttacgtatgctacaactaccatccgtacttggatccagcttccctcttgttcctccgacccgttgcaaagctttcctccagtgcctccttctgagagcttgcaacattgagcaattgctgtagggtatgctttcccggcgcaatggagcgtacagggttgtgctgcgctccggctagctcggtttgcgccagaacctggttcgacttgtactcctcgtccgtgttgaaggtacgcacctgtgactgcgacggcgtggcgttccgaccgaagagctggcgcctttcggccttggacaagttcaggtcgttggcaatgctatccaaggatgacgtaggattggatgatactgttgccgtggaatagtctatggcgactgatgcaggctcggcgagtacttgaccagctgctgataactcttcgtcttcggcgttgtataccagcggctggtaggttgctgatggtccaggtgccgggcctggctgagaagtggcctcgtccgaagatagcgagaagagactgactttgggttttggtggtgcaggagcggggacgggggcctgctgtagaggttgagcgctcggcgctgctgccgaggaaggttttggctgctcggcaatcttctcggcattcttggtggtctttctcttcttttgaggtcgtccgacggataacggtctgaacatcatcggatttccttgcaatttgacttccgctggggttttcattgtgtccgccagtgcatctgatgcagtgtcgggttttgagctgccaggtgcagatgtagtgtcctccgcatctccgcccgccagattttcgaatgcgtaatcattcttcatctccgcatcagctgtgcgatcaaacccagggcctgctcccgttttgagactaaacggttttcgtgttgtcgccacttgtgctttcttttcgagtgttcgtttcggcgctggaaggaaagcgttgaatccggaaaagccccctcctccaccgagacgagcctttttgcgcggaccatcttcggtttcttcgccagatgtgtgttcaggttggatttccggaatcgcgacgcggatcttgcctgggttgctgcggtcgaccagggatccagttttggagccgagtttctttgccctgccaaacttgggtgcgggtgtagtggttggctcggcgtctgagccttcagagtcagagtagcctactagacccatgatgggagagttttggtagagttgttgttgtttccatgacgtttgagggatttggcgacaagttaaattatttgccgcctgaccattcaggcatcatggtattacgtaatcatatcatcccgaatctcgatttgggatgatggaaaggagaagcaagacattacatagtggactgagggacggggatggaatggaccaacgagaaaaatgtccgaagccacagcctaaaactctcctttgacagtgaaacaccagggatgatcccatcactttgtaacgtcatcgcatccgggttctccgcttcgaatgagcttagcaggatcatacattggacaatggtgttaatagacatgcatagtcacttggatcatctgaagcaaccagccctaggatctgatctgatatatgtagaagttgagacatgttgataagtcaaaataggagtgactcgacggaataatggaataataacaccaccatgatcagaaagtaagagaaatagtttctaatagagaccaaatcgacctcataaaccaaattgaccaaatattaatctcccaaatagacatatcagctcaataggggtgttcaagagttcaggtgtgaagtccataatgaaagatcaatgcgtcattctggccgctgcccctccccacttaatccggacctcccattccagcttctctccttatccacccccccccccccccccccccccccaaccccccccannnnnnnnnnnnnnnnnnnnnnnnnnnnnnnnnnnnnnnnnnnnnnnnnnnnnnnnnnnnnnnnnnnnnnnnnnnnnnnnnnnnnnnnnnnnnnnnnnnnnnnnnnnnnnnnnnnnnnnnnnnnnnnnnnnnnnnnnnnnnnnnnnnnnnnnnnnnnnnnnnnnnnnnnnnnnnnnnnnnnnnnnnnnnnnnnnnnnnnnnnnnnnnnnnnnnnnnnnnnnnnnnnnnnnnnnnnnnnnnnnnnnnnnnnnnnnnnnnnnnnnnnnnnnnnnnnnnnnnnnnnnnnnnnnnnnnnnnnnnnnnnnnnnnnnnnnnnnnnnnnnnnnnnnnnnnnnnnnnnnnnnnnnnnnnnnnnnnnnnnnnnnnnnnnnnnnnnnnnnnnnnnnnnnnnnnnnnnnnnnnnnnnnnnnnnnnatccccccttccctccttccccccccccccccccccccccaatggccccaaagcccgtctaatcttctcttcatgccgagtttaggaggtttattgaagaagaggcgaacgaaggattcgcaagaccacgggaaaccagatactcagaaccacgacggttcaggcgcatccatgcaacccgcttcacacggtacgccccagcaccacacgggtacgggtacacacaacaatgtcgccagcatcgaccacattataaaccaggagcagccgaagcaagagcgtgttacaaagggaaagtactctcaggaggactttgagcttcagcgcaccttgggaacagggagcttcggccgtgtgcacctggtgcagtctaaccacaatcatcgcttctatgcaatgaaagtgttgaagaaggcccaggtggtcaagatgaagcaaatcgagcacacaaatgacgagcgccgaatgttaaatcgggtgcggcatccattcctcgttaccttatggggaacttggcaggactctcggaacctctatatggtcatggactttgtggagggaggcgaattgttcagtctcctgcgcaagtcacaagtgagtgatcccatgaccacttccttggttttgtgtgtgtgaacaaagaactcatttgtcattagcgcttcccgaacccggtggccaaattctatgccgcggaggttaccctagcgctcgagtatttgcactcacaccagatcatctatcgtgatctgaagccagaaaatcttctgttagaccgtcatggtcatctcaagatcacggattttgggtttgctaaaaacgtgccggatattacatggacactttgtggtaccccagactacctagcacccgaggttgtctcttccaagggatacaacaaatcagttgactggtaagtctgctttcaatgcttctgtcgaattgctctaactgtcctaaggtggtcattgggaatcttaatctttgaaatgctgtgtggcttcactcctttctgggacagcggatccccagtcaagatatacgagaatattctgcggggcaaagtcaagtatcctccatacttgcacgccgacgcagtcgatctgctctctcagctgatcacagctgacctcaccaagcgcctcgggaacttgcacggtggcccgagcgatgtcaagaaccatgcctggttcgccgaagtcacttgggaccggctggctcgtaaggatatcgatgcgccgtatatcccacccattcgcggtggacagggcgatgcaagccaatacgacaagtatccggaagagacagagcactatggccaggaaggagaagatccgtatgtatttctttccatgccacccgcacgcctgactaactagttccagatacggtcaccttttccccgacttctaaggtgcttgtataattttatgacgcgacgaaaagtcctttgggggagggccggaactgattgacctcgggaggagtcgtgaaaaaccaggagccattatatgaaaatccatacttttctatatgcacatcatttttcttagcaattacaatcgaattcttgtgtttcttttttctttcaattgcctgctcgatgtacaaatgggttcgtcgtgaaccctgttctattcccaatctctccaaccaccggggcacaaaaagccacgcccatattatacacgggctaccaggccgcttctatcgtacagtagttcatacacagaggtgtgtgtgtgtgtgtgtctttttcttcttgtttcgtccttcaaattccttgcttctgattcgatgatggatccaacttagcccaggattccgctgccgccctcgggcatgccggtagccatggaggcaatggcagcagcatcctgaccaccgagacgcttggtttccacgccgatacgggcgatgtaggtcttgcttgtggtgttccacatggcgatgtacttctccatgcagctggacaggcaggtattctccttggccgagagcgaggtaccgggggcaggaacgcaggccttgaagcagtgcttgttgattttctgaggttgatgttagttggttgccggatttggatatcaagggtggtgacgtactccgatcagggcgcgggcgttcgacatggcggcctcctgctggagctggcgcatgactgctgccttgatctcctcggaggtctgaataggagcgggggagctagaaccgaagagcgacattatgagagagtgaggttggtggaaaagtgcaaatgagatggtgttgaattggatcgaaccgaagaaagtcggacttcaggatctgagatgcagggttgtggctggtgtgttcgctgcgccacatccgatgtggacaccttagcataacgagctgtatacttcacctcccttgtctccacgcctgaactttgcctattcactctttcttgtcattttttcgacttcctcaaggcctcttttcttatttctttctcactgggttttcgggtcctggtgacaccgtaccccgtctatcccacctccagtctatctttgaaacactttgggctcccctccattgagccctaatacaattccacaatgcgtcttccgtctatttcctcgcttctctgcttcgcgggcttggtcgccttacccgtgaatgcctacgatgacccaaatatcaaaagcatccccgtatgtgctcaatgttgactccgtttcaagccgaggtactaactttggacatctgtcagcttcgcacccatagcctctctccggtatgatcataacccgcgaacacactgtgcacggatcgtgctccgaggaggaatatcagtattgaccgatgtaacagccatacctcgattcagacttccaaagccgctggttcgacttcggaggagatacagtaatccgcgctgacaagtgagatattccggtcttcaggtggactctgtaatcagtgctgattttcgtctttgttcagatacgttcgcctcacggctgaccggccatcgcagcaaggatggatctcctcccgcgtacctctgaccgcaaccaattggcaggtaaattcacgaaccccgcggaacagaatatgggccaaaagctcacgtacgcctctgctagattgagctcgagtttgagatccacggctccggcaacttgcatggtgatggatttgccctctggctcaccaaggagcgtgccacacagggccctgtcttcggttcgacagacagattcgagggtctcggtgtcttcttcgacacctataagaacaaccgccccggcgtgtcgttcccttacnnnnnnnnnnnnnnnnnnnnnnnnnnnnnnnnnnnnnnnnnnnnnnnnnnnnnnnnnnnnnnnnnnnnnnnnnnnnnnnnnnnnnnnnnnnnnnnnnnnnnnnnnnnnnnnnnnnnnnnnnnnnnnnnnnnnnnnnnnnnnnnnnnnnnnnnnnnnnnnnnnnnnnnnnnnnnnnnnnnnnnnnnnnnnnnnnnnnnnnnnnnnnnnnnnnnnnnnnnnnnnnnnnnnnnnnnnnnnnnnnnnnnnnnnnnnnnnnnnnnnnnnnnnnnnnnnnnnnnnnnnnnnnnnnnnnnnnnnnnnnnnnnnnnnnnnnnnngggctcggtgtcttcttcgccacctataagaacaaccgccccggtgtgtcgttcccttacgtcatggcgatgatgggcgatgggcagacctcctatgaccaggcgcatgacggcaaggcgaacgagctagccggttgctctgtgagttgacattgattcgcggctgttttggatataccgctaactgttcacaggctcgtggtctccgcagcgccccagttcccacaaaggctcgtcttacctacttccaggacaagtccctgtccctggagctacagtacaagtccgaagacacatggaccgagtgcttcaatctttccgctgaggattctaacatcgccatcccctccgtcgcatacctgggcctctccgccgagaccggcgagctgagtgacaaccacgacatcatctccctcaaggccgagaacctatactcacttaaccgcgggaagaccacagaagaccggtccaagggccgtgtccgctcctcccccaagcctgttaaggagctcaaggagaagagtagctggacttggttcctcttcaagatcgtgctgttcttcggcgttgttgtcggtggttactttggctggacggtctaccggaccaagacccggtcatcgcgtttctaaatttacgttgtatggacatttggtaaagcacaggtcttaaaccttcttctgtgcggttcaagttggtctctgggtttgcccagtttttgcatatatagcccctttgaagctcttctttttactttcatctacgttcagctcgcactacagttcttgttatcttttctcttcatctttgaaatgaatcaaagtcacgatcattcataatttgctctgatatgcagcatgatgcttggggtatcaatagtattacaagtaataaaacaaaacgccgcccaatggagagacctccgtcgttacttctgccgttctctctcctcgttccacaagccatctacaatctggaagacctcagtaacgctgcgcatgacagtatcatcaatccctaacgcgccatagcgatgctgaatcttatcgggatgccagcgaatgcgctccgctttaagcgtaccaagcaggtccgccggcggcggagcatggcgcatgaactcctcaacagcttgaggtcgaacatcaaccctcttcccagagcgaacaggccagaagagcagattgcgcagcgacttaggagccgattcctccgcaaccttccgaatagtctcccatctctccaaatactcagcccagggtgcaccccactcagtctttgctctcttgcgctgcgctcctcgccgtagactctcgtccatagcacgttcaaactcctccctcccagattgcgcgttcctctgagcctcctccttccttttctgctgccgctcagcccgcagccgctcctgctcggctaacatgccctcccgtgtccgctcccacatccgtcgacgtacgtagtcaacatattcctcctccgtcatctgttctagctcgccctccggcccgcgttgtacgtccgggacacggtagttatggatgggctggccgtagacggattcccagtatgcggcaccttcgtcgtcgccgagagcgtcgaagagtgactcgcggaatgtgtccgctgttgagttgaaggagttttcgtatgtcgggtcggacttcttgtcctcgcgatggtgtcgcttggacggttcactgtctcgtgtccgtgatctgtgacggtgtttccgctttcggtgaggctgactcccatctttgaagcgaaatgcccgggtgtggcctgtccgggtatgttctttggggtcctcggtaggtttggtggctcgaggatgctctgcggggggagatgccccaggcccctcggtaggtgtggggtttgagttcattataaattgtattttagatggcggagtagctccaattggcagacctcattgtttgggagttgttgagtcaagtaaaacatcgggtgaatgtcaaaaagttgaaggagccaacctaatctggaaagcggagataacgtgtcttagtcatcttatctccacccccacatctacaagacctcatagaagacatcgcctccgtaagaaaggcattgaatgtataaaatctaaatttgggacacagcttctggacgatcatcgagtcttcatcttctgagggtttgagcctccatatggatattttaattgtaaaaatagtgtcattatttgaagaagagctaaagcagagctaagaagccaatatgtgtcggtagagctataagccttgaattctccagacctggcatgaaatcaaattcaaattatcaagtgagatctggttgtctttctctggtaaggagatcggttggtggccgaacagctcctcggtcctgacgatcaatggtggaatatcaacttgacacagccactgtaagaatgaattcaaaattagggtgacaaacgaccaaaacgacaccgaagaccaaggaagacttaccaattcacactgtttcgtgctctgacccagtgttagcaacgcttgttgcagtttcatcccccgtatatagtttatcttgaatggctgatccctcttgccttgtccaatcgtgcagagcgatatggaagcaatgaaatatacaggctgtctctgaagggaccaagttttttcggcagtttgtggtggactcaatgactaccagtgattgcattagtagtagcatagtagcgtagtcttgtcaccgcaaacctgatgtctggtctgattttgattagccagtttagcataccgaccatcatgtggtagtagtcatagtcgcctttttgtataacttcggctttggagatgatgaaaagagaacaagagcacttttataacgggggcatcgccttcatcgctgtaaatattcttttccttttgatgtagcgacatgcgctgatcggtatcagcgaatcatgcagatgtgacctgtcacactgatccttgcagcggttggggatcgcaacgatagcaacggtgttgatagcgttggccggacaaacatagtagagtaaacattaaaaacaagagtgcgggacaggtcgaagtagagaatgtaattcctacaacctaggacatcgggctaagctgggtatccatattcaagtcattcttttattcttttactattcttagcgtcaggcgctaatacccactcttggtctatcgggctatcgcgatatcaacccaccgcttctctgtccccgcgtctcaaaacaaacgcctcctctcgatcttacacttcatttacttaccttctggagattttcattcggatttacgccactgcacgtgcctactccctgaatctatgaattgagtggatatctttggtacctcagcttctatggaggggagcgcgaatgtcgcaatcgctttaccaacaacaggataacacatcctacatgcgattttcaactgtctctcactgctcagcataggaaattttctctcatttaattctaaacattacgatcttgtctttcccgtcactcgttatcttgctactccaacgttccttctgcgacaaaccccggcgcatttcatttgtttatcgcacacggtagcgcttgcccaacatcttctcgcattctgcacttgcattgcaagtgcaccaccattcgctatggcgactatcgcacctccctcccgnnnnnnnnnnnnnnnnnnnnnnnnnnnnnnnnnnnnnnnnnnnnnnnnnnnnnnnnnnnnnnnnnnnnnnnnnnnnnnnnnnnnnnnnnnnnnnnnnnnnnnnnnnnnnnnnnnnnnnnnnnnnnnnnnnnnnnnnnnnnnnnnnnnnnnnnnnnnnnnnnnnnnnnnnnnnnnnnnnnnnnnnnnnnnnnnnnnnnnnnnnnnnnnnnnnnnnnnnnnnnnnnnnnnnnnnnnnnnnnnnnnnnnnnnnnnnnnnnnnnnnnnnnnnnnnnnnnnnnnnnnnnnnnnnnnnnnnnnnnnnnnnnnnnnnnnnnnnnnnnnnnnnnnnnnnnnnnnnnnnnnnnnnnnnnnnnnnnnnnnnnnnnnnnnnnnnnnnnnnnnnnnnnnnnnnnnnnnnnnnnnnnnnnnnnnnnnnnnnnnnnnnnnnnnnnnnnnnnnnnnnnnnnnnnnnnnnnnnnnnnnnnnnnnnnnnnnnnnnnnnnnnnnnnnnnnnnnnnnnnnnnnnnnnnnnnnnnnnnnnnnnnnnnnnnnnnnnnnnnnnnnnnnnnnnnnnnnnnnnnnnnnnnnnnnnnnnnnnnnnnnnnnnnnnnnnnnnnnnnnnnnnnnnnnnnnnnnnnnnnnnnnnnnnnnnnnnnnnnnnnnnnnnnnnnnnnnnnnnnnnnnnnnnnnnnnnnnnnnnnnnnnnnnnnnnnnnnnnnnnnnnnnnnnnnnnnnnnnnnnnnnnnnnnnnnnnnnnnnnnnnnnnnnnnnnnnnnnnnnnnnnnnnnnnnnnnnnnnnnnnnnnnnnnnnnnnnnnnnnnnnnnnnnnnnnnnnnnnnnnnnnnnnnnnnnnnnnnnnnnnnnnnnnnnnnnnnnnnnnnnnnnnnnnnnnnnnnnnnnnnnnnnnnnnnnnnnnnnnnnnnnnnnnnnnnnnnnnnnnnnnnnnnnnnnnnnnnnnnnnnnnnnnnnnnnnnnnnnnnnnnnnnnnnnnnnnnnnnnnnnnnnnnnnnnnnnnnnnnnnnnnnnnnnnnnnnnnnnnnnnnnnnnnnnnnnnnnnnnnnnnnnnnnnnnnnnnnnnnnnnnnnnnnnnnnnnnnnnnnnnnnnnnnnnnnnnnnnnnnnnnnnnnnnnnnnnnnnnnnnnnnnnnnnnnnnnnnnnnnnnnnnnnnnnnnnnnnnnnnnnnnnnnnnnnnnnnnnnnnnnnnnnnnnnnnnnnnnnnnnnnnnnnnnnnnnnnnnnnnnnnnnnnnnnnnnnnnnnnnnnnnnnnnnnnnnnnnnnnnnnnnnnnnnnnnnnnnnnnnnnnnnnnnnnnnnnnnnnnnnnnnnnnnnnnnnnnnnnnnnnnnnnnnnnnnnnnnnnnnnnnnnnnnnnnnnnnnnnnnnnnnnnnnnnnnnnnnnnnnnnnnnnnnnnnnnnnnnnnnnnnnnnnnnnnnnnnnnnnnnnnnnnnnnnnnnnnnnnnnnnnnnnnnnnnnnnnnnnnnnnnnnnnnnnnnnnnnnnnnnnnnnnnnnnnnnnnnnnnnnnnnnnnnnnnnnnnnnnnnnnnnnnnnnnnnnnnnnnnnnnnnnnnnnnnnnnnnnnnnnnnnnnnnnnnnnnnnnnnnnnnnnnnnnnnnnnnnnnnnnnnnnnnnnnnnnnnnnnnnnnnnnnnnnnnnnnnnnnnnnnnnnnnnnnnnnnnnnnnnnnnnnnnnnnnnnnnnnnnnnnnnnnnnnnnnnnnnnnnnnnnnnnnnnnnnnnnnnnnnnnnnnnnnnnnnnnnnnnnnnnnnnnnnnnnnnnnnnnnnnnnnnnnnnnnnnnnnnnnnnnnnnnnnnnnnnnnnnnnnnnnnnnnnnnnnnnnnnnnnnnnnnnnnnnnnnnnnnnttctgatgctcacggtgacagtgaagaccacgtggatactggagactctgatgctcacggtgacagtgaagaccacgtggacactggagactctgatgcctgcaggcctaccgaggaccacgtcgaccctggacattctgatgctcacagtgacagtgaagaccacatggatactggagactctgatgctcacagtgacagtgaagaccatatggatactggagactctgatgcctatagtgataccgatatcgatgcagaccacctagaccccgactattctgagcattcggctactagggcccagccaaaacagaaatcatccagtgcatgcctctgcatcgagagcggctttacacctcacctcctttgtcttctccagggaaagcgacagcctagtagcgatatcctaaatgctgatcaagatcagtcccacgatgcgaatactacacgaatcaagccgcaactctttgagaaaattgctggccgtggtacacaatactgggcactttcccccgagaatttctgtcggacccatgctcgactcctcgccagtggaatcgggctccgcagtaagccgaataatcaaaaactcttcagccgcttacaatatatcttcgagcacctggagagccttgcccatatcaagagtgacccgacatgtgagcagtggaagtggttccaacaggcggctcggacccctagtcccactgctgcacatggggtctttaaatacccagtcgaaatgcctaagcctcgcatcgaccagtttgccgcgagtggcatgactgcagacgagatctatacccgggtaatcggtccccccccgacggctcccatcgcagacttatgggatgccgatggctcagtggtcattcctctcttccgctggcttggtgagaagaaactgcttggctgtacccatagcgccgatgtcccctgtgagcataccggcggtctctggtcgatgattgacttggaattcgacatgtatgagcaccaccgggcccagggcgagaatcccgccgaagaaagtgtgaccagcatgggatggctccggtgtatgtggcacggtctgatccagcagctcatccgccaggatcccgcatactatgccttttatgttctccttcgcccagatcatgcgtggcgcctgatctcggtcccgtggtactcgaaaagtaccagtgccggagcccagaccgcatttcggcacctcgatatcaatatcccccgctatctcagccggggtcggagtgctaacatcatacagggcgcggtcaccctgagcgacgaggacccggcgaattgtaccgagctcctccttggcatgcaccgccagggactcttgcagcagtggtgggaacgggtcgagcagcgcggcctctccaaccagaatgtcgttcatcgcatcgccagtgggatgtggactgccgctgatgaggccgattttggcctcacgtggcagcgccaggtctgtcaccgaggggatgcgcgcatctcgcgcccggagctcccctatggctcaaccggcccggccacccaagtccgacgtaccgtcctcccatggtttattggcattggcgaagaccatgagcagctggatactcacgatgccggtacgtggtctgctgtcgctgcgtcgcatcgcgatctcatccccgccgagagaggtacccctggatttactagcgtccaccgcggagctgtgccatatgcattcccgggcgcggtccacctccagggacttggtgcgatctccgatgcgctggttggacgccgccgatggaccaataccagtgtcatttccgagctggacgttctctttggggccgatacccatgcagccgaggtctttatccagcaatggcgccagcgagcagcgcaggcatttcttactactttccaagaggtccagagactagaggtcttatactatggagtaaactccttttttcgcctccggggactagtataattttatatggccgactaagaattcatataggcttagggtgtgatttacttctatatatatcgtagataaggaatttcagtagtaattcatttcttctataggattcatttctagtacagcttttaactttgatcattggcaccacgtaacaggattgatagaggcttattcggggcgctttacggaccgctcacaggggcgcaggtagcgattatcccacagtatcgcttaacggagctcccgctcgcttacaccaactgtttcagcgattgtacggcagaccaagcgccagtgttcgtgggagatggcagagttcgatatctgggttcggcgaagcatgtctgaagcaagctcgcggcttcccagaggcgggatcggtagacaaatggtcctgtcccacagtcgggatataagtgatattcttcggggctcacaggcatcttcgtccagtcagtatatatatatatatatatatatacagtgaagtcacaggagagtgtagagaaaaaagaaggaggtaatttatagggcaaagacataaaccgaaatgaaaagccacggtttgtcttgcgaaaaaagagagaaagagagaaagaaatgaggttgagaatcaatggtgcaggcttggttgtcttagaaactggtggtcgttgcacggtccttgtatgaaaactatgaaagagattcatattcaaaagtgccagctcgttgtctcttatttgcctggtcgattgccagccattatctcgtcgcgttatactacgtagtataaacttgaaaactcccctatagaatgggtggatgtttccttgggctcttctgaaaaaaagcgaattagagctgaagtaaaattacagttataattcgttaccgctgagaaaaggctgtgaaattctttaaaaaagaaatgtgagagaatgcaggtcgcttggttttagttgttatagttacttcgtccactaccatatggagtatcagtataactttgaaatggtctgtttaggaacaacgaggttgatcattgactgaagaataagccagtctgagtccatcaactacttccaatgttttatcacgtatggattgcacataacacaattctatatctgcggctaattcctcttatactctagctacaacatcaaataaggtgtcatatcttttgtaaaaaaatcccttggaagaccaccataccataaagaacattaagcaagagtaccaaaagagaataccaaaaagacatgacaaggactagtaaatgcttgtaggagtttgggttgagataaggttatgccaagagggcgacgagtgggactgggatcacgtggtattgagataccaagctaggatatgatacgataatctgggcagctctctaacatcccccttcttggtgaactacttagaaaagtcaagggcttgaaagcttgattgaatgttgaatgtgctttgttgaataaggtgaaagctgcaatatgtctgtacaacgccattccctaacccgaaatccaagccttccgcccaaaacgtaattccatgtccgaaagagcagaggatcaaatgcgataatgcgccatattcttcttgatctcatccacaatctccacagcttcattggtactccttgcctcaaagtcataacgcttctgctccgtggcatcattgccgcgcacaatcatcacgcggaagctcttggggtgccgtcggctgaccttagatccgatcacgtcactgaagctgatcgatcgggtcttaccgccggacgccgttttgcccgtatcaccgggcacgatatgcatataatcattctcaaacgtgaggatgcgatggttggatgctgtgaaagacatgggctgtttgcggaacacgtggtatcggcggtaataaccgcctaggtggtcttgcttctgagaagatgagggcaacatgcgctgcgcacccttcttggcctcctttttgctcttcttagaagttgtcgggtctgcggtgtccaccatcaaaggcgcatttggcgatgagctgcctggcgaggttccgagtgcgagaggcccgccgccgaagcgacggcgcaccagatcaaggtcggtgatgttgcccaatgcctccactgtgcggtcaagtggtgcaatcgtgttcgaccccatcacctttaagaggtagttgcccttatcctggccccatcttttacatacagaatccagaatctctgctatatagctatcggtagatgtgttgatggtcatgacatgtgcggaagcctccatgttgatgaaacgaatcttcaatgtcttggatacaccaagtcggggagtcgcatgcgagataggtaccaccgggcgatcggcaggggtaagagtgctgtggttgagtgcagacgagaatggctggcctaggatagggtttgttcggcctggtgtggcctgagggctctttttctgtgcagtggattgcgcccctggtactgcaagattagccggctgatctgcctcttccaacccaatgcttgaactaaattggggatgtagccgttcattctcctcaaactcggagttcgatgcttcaaccagtgcgaattcatcatatggcttgccccttgaccgtcctcgggacttggcagattggttattgtttgacgtaaaatccgtcattggaagtgtccgcccaagcgctgggaagtcatactcgacttcgccatcatcgaccatccgtagcgtccatcggttcacggtcaagttctcgcgattaattggtggaccgcgaccgtcggccgcatatttccatagggcaagaccaatcgtctcagcaacggtcacttgtgcgggctgttctgcaagcttagattcgcgtgtaagtgacagatcgagcgggtcttcggggtcgcttgaaaaaggaacgtagatcttcaaatataatgagtcctcttgacctcgcccagagagcaccacgaatttatccactggattgcttggtgctcgcttccgcgacgtaagctggctggtcaataagctgaccggcttgaccatgctgataggtcgtggcgggggaagatcttgcaatacaggagccggattgcgatgcttgcgcggtgaattattctgcggccctgtgccagagggtaacttattcatcatagccatgggcgaggacaaattcaaaccgcccgccacgcctgccagcagcaaggagccagacccagccgtattgtcaaaatcagatgaaagtgcagaaccaacaaactcggcaccagagtcctcgtcctcctcgtggagttctccgagagctaggctctccgcgcctcgactgccagttcgctcgcgccgtctgcggggatactcgacgacctgatcactcgcggagaattgaacctgtccttgtttgtagcctctaagttcggtttcgttatccgtcgacagatcactgctcgtggttgtatctccacgggggcgtggtttcaattgactgaactgactcgcaacgttttgtgttgatgcagatgttaccatcacttctggccgttccctccggaccccagaacggattggagaggagtcggcgcgatctcgatggatgggcatcttgtcaaatttgatctgatcaatagcactgttgttgtcagatagggaagtagaataccacacaataattcaccaacctgctaacgtctccaacgttgtccccatcgtcgtcgctgtcatcactcagatcgctgctatcgtcgtcctctgcttgcgcttgtctctgaacctcttgttgcctttcccgtcgagttttcttctttccgcctcgtgcatgattccgccgcgcggtcatatccgtatggcttttgccggtcaccatgccaccatcatcctcgccgtcttccaggccgaggccttgcaaattgtggtgctgaggtttcgcatttcgttccgctagcctgtaatattcagatgaaacgtttgccgtggttggaatcggtggggagtaagtgcgcttcagggaggagctatgtgtgttcgggtacgcagcggcggttgaccagcccgccgcgcggaaacccggtggannnnnnnnnnnnnnnnnnnnnnnnnnnnnnnnnnnnnnnnnnnnnnnnnnnnnnnnnnnnnnnnnnnnnnnnnnnnnnnnnnnnnnnnnnnnnnnnnnnnnnnnnnnnnnnnnnnnnnnnnnnnnnnnnnnnnnnnnnnnnnnnnnnnnnnnnnnnnnnnnnnnnnnnnnnnnnnnnnnnnnnnnnnnnnnnnnnnnnnnnnnnnnnnnnnnnnnnnnnnnnnnnnnnntgtcgggggggggggggggggggccccggcccgccgcgcgaaagccaggtgtattcagcacggagtcattgacgttgataagtcggtccccgattccatctttgattgttgagagataagaggagcgtaattgccagatcgtaaagcttcactcgggttagtccttggagacccttccgcggcgatttgagggccagtctacgattccggacgcgacttactcttcattgtgaagaagagacattttccaggctctcacgaggacatacgtctgtaataacccaggggtatgctgcgcagtagcgaccgaggtctagatatctcacagcagctctagctaaaagcgcatgctcggggaataaagggagggaaagcgaatgagactagctcatacaggaccagcctggaaaaaacagataaaagagataaagagatcaggaaaggagagcaaggagggagagaaaggagagttgtatgtcggaagcaagatgagagggaacttcggtgttcgcattcatttccccgccaagggggccacactagtcaactacatcgatgtttacatctccgtacaggtacaacacttgacgaatcaattattatacacatggttatactctcagtcttgaggaatattgagaaatctgttggcggaacatatcatagtactatgctggactactctgcctcaatggctgacgatatgacaacaagcattgagattcaaatcgaacaagactaaactctttgaacatcatcaaaagtgtacctagaaagaaaacacgacactctctccaatacctgtgagtttatcagccgctgccaatgcatccttccactgatccagaccaaattggccagcaacatagcatccgtcctcttctttcaggcgaagattccccctctcgatcatcttgatcaatgcaagaacatcctttcgctcatacatccagtttcccttcaatgtgatattagaacgtgtaacaaagacatttgggatctcaagctcttcataggcacccatcagactcacccggcctccaggtctgagcgacataatgccggatttgagatggaaagatcctcgagccccaggaggagaaatgtcgaggaatacatccatcggaccgaatttgctgatgttgtaggcatcattcgtgcggttgcctgtccaggttaccgtggagattctttcgcaagaaccgttgaaagtgcatgataggatctgattgagacgcatgagcttagcatcatcgtgagaccaggctacaacttttgcacctgatattcagttagccaaactcctgattgtctggggatatctttggtagctaaagagagatattacccatagccaaagcaaccatgcatgcagcaacgccgtttggataagtggccggagaaatcaacacggtttcaccgggcttcacgtcaatgctactcagtccaccgaaaggcctgaggaatgtcgcaatagcacaaagttgttctggggtataattaaagccccaattagtcggatctcccatcaacttaccttcatccaatggatagcaattctcaagtggtgccctcatgaactcggcatatgagccatctgcaaacccgctataggccatgatttccttgatttgagagtcaaatccatgatacacggggttggaaaatcgaaccatctccgggttatctcttcctttcatgaccgagtcaaagaagatcagttgaccaaccttcagagtggttgcatcgtcaccgacctggctcacacgggcaattgcacttgagccgggaataatcgggatttcataaggagatctgaaatggttgtaaaaatcaaaacctagcttactaaaagagtggaggggcgttgccaggatacgcagaagaacacttccgggcagtagagacggcatagggacttgttcaacttggggttcggtaaatggagcaggccttagaacgagggcacgatgggtgctttgaaccaacggaagaagctttctgtgcgggatgattggacgtggagtgtctggagaatctgtagacagacagttcagtgtttatactcatgattggcgagaatacttgacgtacttgttgtgacattgtcagagtcactagattcagagacacgagtcatatttgcatgcaggaacaggtctgcacagaagaagagtcgagatagcaagagctgagataaaagaagtggaagggtttgaaggcattcacgaggggataggaatagcgggaaagcagcgagagaagaaaacaagtcctaagacacgtcaaaatgtaaacaactaaattggtgtactcagagacagcagattaaaatgcaccaacactattgaaacgcgtgctccttgacgaaacgataatatgttacaaaaatgagaatctctcaagccttggccttggccctactcttacgagctttcttcggcttttcctcatcggcatcgacgtcaccatcggtcttcttcgtcttcttgcccttggccggtgccttctttttcttaggcaagctcacatacttgtccttcttcaggtcaagttcttcgtcctcatccttgatctcttcaacaacttcttcttcgtcggatgcttcaagggcatcttcaatatcaggcttgtccttcttccccaccttgggtgccacaacattgctggccttcatgaatggcatcgggtgcgaacgcgagttgtacagacgcgtgaaggtagctttcgtctgtgtctcaagtttgatcttagactcgtccattgggcctagtcctagttcaaccatggaatcaaagtcctctcgagtgagatagtattcatccatgagatcaatgaccgactcgacacagtccttgccttcgtccatcattcggcgtatcatcttctcctggagcaagggcatgtactgttgacggatctcgtcgcgattacctgtagtacgaagacgcatgtggccctgtatttccttgacgtatcgggagagtttgcctgaagaataaatcagttagagagtgtactatacagagaataggggaatgtccaaaacataccatgtttgctattgttgcccagccagctagtaaatgcaggccgcccatttaagtttccgtactggaagctggctggccgcacaaagctgaagatcgcatgagtgggcataagactccattgctgctgggtgccgtggatcatgcggtcgacgaggtcgccatcgctgatactcgaagcggcattgtccatcaattcaagcgctttcagtcgctgttcctcgccctgatatttgcccacaagagcaggtttagttctgaggtagttctcctgaagcatcaggtagctgaactcatgatcgttaaaataaagctcgatcttgtcattcagggtagcagtggaactcggggaaaacatctgggcgctgagaattttgctgacaatatcccacggcttgagaatgatattcttctcccacgactttgacatttgcttcccttcatcgtaattaagacccttttgatccagtcttgctgtggaaagcatgttgatgacctggcggatatcggcatgtgttccctcaatgaggccgtcgagtacaggaggcggaatcttaaggccttctcggaaacagatagtggacagtcttgcccgaatttgctcagcagtcgggcgtctgaatggcacgtcataggtgatgaagtcgaaaggtttcatctttggaagctttcgctcattgcagatgaggatgatcggaatcttggtcttcttgacaatggctgcgacagctcccacacctccgcgatcaccggcagacatgccatcaacctcgtccatgataagtacgagctttttcttttcactatcgacttgcttgccttgtccggcgaaatatccttgcaatgatgttgtatctagcacacccaaggtagagctctcgacaagcttcttacttctggtgtcactggcattggtctccacgatatcgaatccttccagcttcgccacgagatgggctgctgtagttttgccgattcctggaggaccgtgaataatgacggcacggtatatccccgagccgtctttgccgccttttttgaaatcggcctgggcattggtatgccagtcccgcaaccaggtctgaatcttttccacagcactcttattgccacagatcatactggtcgatgttggggcatacttcgtggtccagagatcaccagatattgcgggctgtgagcttggtggcgtctgagacccggtggccgaggtcttggatgcttgagccgcggccgtctttcgtttttgctcatctcgtttcttctcctctgcatcaatttcggccgccatagcacggaccttggcctcgtcggctttcactttctcggcatgcttttcggcagcctttccatccccgccgttggcagggagtcgtcgaatcaattcgaagagaccatcctcgttgatggtcttgatcttgtgcttcgcaattgtctcaagcttctttgggccggcatcagatccgagaactacatagttcgtcttagaactaggagcccccacgactttgccaccatacttcttcaccaattgcgcaccctcttcacgacccagggattccaaaataccggtgaaaacaaaggccaaaccagcaaggcagttttcttctccaacgggcatctccttagtcccagccattgccggttcccggctttgttgtgctccaaatttgaatttccttggctctccctcaggaggctctggggcgtcaatcgtaggaatgctgtcgaaaatatcttggagctctttgctctctggtttttcctcctttttggcctttttagggctagccttctgcttcttcgcagctgatgctgccgcggctttggttttcggagctgcctttttcgtttcctttttgggttcttggtagtcgtcttcatcctcgtcgatgagagcttccgatttgcgcttgcgaccaggtcgagccttcggggtaggaattttggggagatcttccatgaccacgtcatcctcgtcatcgcgagaaggttgcttcttctgtgccttcttcaatcctgcagtgactggccttacctcaagcatttcgaagtcactgccatcgtcattatcatcctcagccacataatcatcgtctcctttgccggcttttccatattcggttgcaaaaatgtcatcggcgccaagattttcatcctcaaggacctttgtgggtttctttgttgataccttagtggtggttcgtactttgttcgcaggttcttcggcagtcttcttgggtttgggattttcggccacaatcttggctttatcggactgaacttgctcagttggttttgtaggccgtggtttcttcttattggaggcgaaatagtcggaggaagttgtaggttcttctttagtctcttcgggctttctgtagaggaagctcatcagtcaaatggtatgagacatttcaatccagcgatggacatacgattgacttttggactttgctttgatagcgggcgctttggttggtgctacatcttcttcgtcactgtcatccacaatctttctgctgcctgttttcgcgttagactggtagtgcaggactatgggttatggagagcatacgtctctttcttgtggcagaggagtcctgcattgtcggatttgaggttagactataatttcaagcaatacgaagggcaccagtacacatataaagtaaccaggccctcctttcgtgagcaaggcaccagcttacctcttttttagctgcgggtttcgtagcggcgtcgttggagccttgactcgacttgccaccaaagaaattccggatgtccatactgagtcgcaattaatgacacggaatttggcacagaacagtaaatgaaagcgcggtgtatggccaatcgagctcttgccgcagcgtttgctagatcgcgaacgacgcgccacacttccggggacgtgactggctgacgtaaggcagcacttccttccattttaggactagcgtatataagctaagactacttactaactataagaatcaggaaaggactccaaggcctcattagcactccttacctcaaagtcataaacgcttcaggcatgagatgtttgtatatagtgtcattggtgccgagagatatatatcggatagcaccggctgtgcataacatatcaaactattacaggacaagacaagaggattaccagtcagacatattacatatccatagtttcaattatcgagttgcgcagcgcggactttctttagtatgattgagtgcatcttccatcaataaatagctatttggagctacaacgtactatgttagaatataattagactgaaattgaggcctggttttcaaggcataatttagcaagtatggataatgtcacgtgctctgtgtctttccactttgggactagtgtaaatcatcgaaaagtgccggagtaacgaagcctttcgcaacattggtatctctcgccgcctccctcctcacaatgggtccccagatcaagatgtttgctggaccgctttccgcctgcacacggccaactcgtatgagccatttaacccccataaaatccattcggccgaagactaacagtgcgacatagtgtcgggaccgctggccaccttttctctatcacgatgcttctctaccacctcgcccacccttgattggctgaccccgaaattccaagaaaaatccaaatcccccaagggtcgccctcacgttgctaccggcggatccacccgaggaacaacagtcgtgtggggagacttcggtctgcgcatgaaagaccacgaccgccgcatgcccgcatcggcgttgaagatcgccgaagagaccatcaagcgacggcttcgaggaatgaactataagctgtacaagcgtgtcagcgccaacgttggtgtgtacaccaagggtaacgagcagcgtatgggtaagggtaagggtaagttcgactactggactgtccgactgcccgtgagccgaatcgtctttgagttgaagggagatgtccacgagaagattgcccgcgaggctttcagattggcgggccacaaattgccaggtaggttatgcattttctacattactactactagtgcgaaagatgctcattcttattcattaggtctttgggagttcgttaacaaggatgacccgcctgtcgtcggtatcacaaagctcggaaacggagtcactctcgactccctcaagcgagctcgcagagacccgcccattggtaccaatgacctcgtttcacctccgcagagcacctcatccagctccgactctacacaataaactgccgcttcctgcatgataccgttttctcttttttcatcggtcatgtcttttgcttttgtcgtctttgccgactaagccccgacaccagagccaggcccatacccctgctgtctgcgggccttggacacggcatcgtcctcgtcacgtttcatatcttttgtacattatcatcagctgtttgcgtctctttaggagccgtcgaggcacgggctcctctgatggatcttttgtcttgatactaggagtttagacaaggaaaatatattcaggatttacctttaccggggtcagctaatgctcccattcctagcttctgtgcctgggcatcctcgtcgttgctggatgctggccctgggctatgtgtccctagatcagggctcgcttcgcttatagtgtgcttctggccaacttggatgaggtcagtcattgctatgcctagtgcactcagaattatctccaaggaagcgatataccccctagctgtccggtctgcttgggaggactcttagtgaattccctaatagactcatatctgcaccctgtatattagcgaatagcaattgcaagagatggtcttgattcggtccatactgagtgctctctccgcccggttccatatcaacaagtctggggtcggacattttggatgatattcgtatggaatagaggtacaatagtagaattgtattaggaaaatcagatgaatgctattccgatgttcccactgggtggtccagtttatgaatgacggggatgcgatgacgtatgttaagaggtcaactgacctacacaattcaggtttcttgatatcattgtataaaatagtatcgaatgtgctctatgtacttagaatcgaccattgctacaatacggctacagcttcgctgttgaaatatatagagctacgagttgggcacgtgtggttccagaaataaatagtcttggtgcattctttatactacaacatttagcaacattgcgcgttgaatcataatgggggatcaagcacaacatattcgaaaacgtatcatgaatcaaacccagacacaattcatagtttcctcagagaagttgattcaggaccaattcgaatactgggcgacacccccaacaccctactcgaccctggagagtatctaggatctttacgtctattcatctcaaaggcacagtgttctattcgcaatcatcgtctagacgtctaaactagttttctcgctgtggacgtataccctggaagtcacgcttacttcgtcctggacgttaacaatgtcgactatgtctatgagaccgctcataccgatacgagtcccattcacatctacgttcttcgcctatcgaagaggaaaatcagcatcaacaggcagcgacagctagacgctaccattgctaagagatttagagcgatgcacaatgggcatggggatgaccctctaccgttgcttgatgattttaatcggactgttgaatatcacagtccccgtggtcttcggcggtagatcttcaacgtgatcatctgagtttcctctatcggagtttgacccccatctgatttgatttttgttttctcaatggaagctgcaatgctgggggcgcctcagcccaaacccaaacgtgcaaccttgaagataaccatgagtgaactgtgcaatccctttgctcaagtgatacagactttagcgacgtcctgcgggtccagattccggagagtagacccccatcacgacaatccttgcgtaatttagatacagtgatatcaatctttgtaagcaataccgggagtccgtgacttgcagtattaaatgaaatgtgatataacgccagaatccttttcaaaaatgccttcacgcgcctggaaaaaagtgaaaagtaaattgcatacctggggatttcgaaaaaagtgcagttctgcataatagcagaccataacttccgagatcccatgctcaccgaaaaccaccttagtgtacaaatcgtcattcatccattgtcttggtttgttgacagtgagtaattagaaatccatgcccatcagatagctaaagtgctattagttatatgcctccattaaattatccaggggaagtatacctttcatagatgcgcatgaacttggccacgaaggcttcgagatggaagattattttctgtatcgaaatattcattagcttatattgatggcaatgctaaccatcaataacttacacttcccagcttgatgcggtgctcatagaacgcagaccacttgataacttctggtttcagagcatcgtcaactcgtgcaacaagcttgaatgtcaaggtctagcaccagcagttaatatctggagcatgttcattgaataggtgtatacacaccttcaaaatagttgttggggggatgcaatgggtcagaagatcataaagacgtgcgcggacttgcaacagccgagctggtgaacgctcagccataatctcatcagccgttagggcaacaagggcttcccagtccggaggcgggatgagggtcttgtctgtaaccttttcactacatttccaagaaaacgtaagcttctaaaatccaggccaatgggaaccgaagtagaaactcacttttgcgcataaatagactcaaacatgagcagcgcacgacgcagattgcgtccactctccttcgcaatcctcttgttcagcacctgagactcggtccatccttccttttttcctgcgagatggagcgcagagcaaatgtcagcttcagttggcgctgcaaccctgaccagcagggttcgagaccgaatcggtgcaatgatattggaggtactgttggccaggagaatcaatcgtagattgggactgtatttctccatggtacgtctgagagctgcctgggcatctcgtgtgagatgatcggcttcgttaatcacgacgaccttgaaccgctgcttcgcgccgagatccacctgttgcgtctgcgcgacctctttaagcaattcctgaacgactactcggtcatagtttccgacatctgcgggggtgatctcgagatggtacaccgatgagacaatattgaactctagctttcggttgctcgtcgtttggaagactctggcgtcgatcttgatcttctcgacaccggggccgtacagttcttttagtgttgcaatgacccgtgttttcttgccagcgccggagggtccatagactagtagatggggaaaatctccgctttgtgcctgttaggggtaccttatgttaaaattgtgtcctgttccgcagctcagactttcttaccagtgaccgcaggcgatcagagagctcggggtggtatgtgagagcatcgagggtgcgtggccgtagtttatccacaaggagagccattttgaaaactctgtaaagctgttgagatgaggaatcgaggtgcttgtggtttggatagaggatgcggacctgagaacgcgtccagacacgcgcctaattaatcactggtccgtgcacgctcccactataatcagcttcgaagaaatgatttcgacgtagatcgtacaattacatatgaataaatttaacgatatatacagctatatagttttctaggcatttggcagccttccgccaaactccgatatgtatagtacatgcaaatttgctttgagagatgagatgaatgttgaaaaagcccgacacaacaccacgcatgtttctttgttcactgttaatgtccaagcctatacaaaccaacacagttgaaatacagtaccccaatgcgcccttggtgtgagctttttatgatgcaattggcgtcagaacaccattgtcatcatatttagcttctgcgttgggttagatcaggccaagaaagcaacgagtagacaataaaacttactgaagaaggtgtatgacagggtgatagtatcaatgcccttcatattagggtcggtagcaaagtcgggatcgatgaagaagaagacaggcatatcaaccgactctcccgcattgagcttctgctcctcaaagcagaagcattgaatcttgctaaagtacggcgcaacctgacctggcgtgacgctgtatgttgcaactccaataatatcctgaggacccttattcgttgcggtatagaatgccagcgccgtctcgccgggcagcactcggacttcacgctgctggggagtgaacttccaagggaggacatccgataccgagccgttgaatgtaatgcgcaggcgacgagaatctgtcaccggcgtcacacgtgcagaggtatcaccgtcgccgattcggtgggtgagaatgggctgaccgccccaaccggtctgctggcaaatctgcaagtgggatcagaatgatattccgtttatgatgtactctagatcgagggagagcttgtcataccattttgtagagagggacagatccatatgcaagggcaaccgttccaaggatcatactgatggtatagtacctgatcgggggttttgttagcacatggattccctccggtccgggttaaatggcagctcacaatgtagagttattgcgtttttgtgattccggggtattgaaaggcgctgtagatgaattgcgttgttcatgaagcaggaaattcttcgagaaataccttcgctccacctcgaagacgctctttcggagatggattgatcgctgtggaattgttaccgtcagcgcagagcgccccagcgagggggttaatcgtgaaaacatggttctatgactttaatgggattggacgttgagtcgcatgagatgcagagtatccaacacgtgataattctgattcaacgccttatcgataaggccttaagcttcggagtcacgttacatttaaacggcgggcgacattgagacaaggttagaaattagaatgtatgtgtatcttaaattgattcttgatttgttcatgaagattaaccgaatcaagaattttaattagaaggttcgaccgcacccttccggctgccgaggctgcagagttggctttagcagcgactcattactggtatagaggcataaacattattcgccttattcgccttgtacaaaagatatcattaagttcgggaaatttgaaagcattcatatgtaatgatgcagagttcataaaaataatacagggtaatggcacccagaagttagacccgaagtataaaataaccaataactaatacaaccgtttgatggcatcgaagcatttcactggaagtctaattcaacacactcgacgtgatgcgaccaaacacccctcgtaccatgctaggtcgctcacggaggcaagtgataagaacagcagcgctaacagcaaatgcgatgcgctctcggtattgatactgggaaacacaacacgcgtcagcatctcgtgattgttttggaacatgccacaggttaattcgaagacattaagaaggagttggaggggatgtgggtgtaaccctgttgtgaacagatgatgcgagggtccgatacatacctttttctcatacaaccgtggcaaaaccgtggcggcagcccggggtgccacaaatagcgccaactcctgcctcttccgcgtcttttcaaccaatatactccagccgcacatgagacatcccgcaccgacacatagcccagagtcccacatcatcggagtgaccgtcttcgcgtcaaagaccttggggccgagtcgtgtccgagcgagacagacaccgtagtaaaataagctcacaaaagatgcgaggaaggcagatgagcgtgctgcatcagaaagggcccgacgaagggcatttgcagatttcatcctgcgcaggcggaaaataatctgtaggggtatataggttgcacaggcatatttgaaggttctggcaaatcgatacaatgcgtgtttttcacagctggggccacagcccatgtgaaccatttcgcaagggatcgggacaaattttgatgggtcaccccatacctctggccagttgtaatcattgcacatcgactggagaagaggtgcctggcctgtatcctttccatagacgaaaactcctcgtcgagcacggcgcaaggcttcaattaaacgtgagtcgacctgagcagcttccccgatccacttctcataggctctgggcagtctttcggggagataaaaccacgcccacatgaccacagccgcactcatggcaaagacagttgcgtcggcgaagccagggacaagggattcgacagtcgtccagcgattctgggctcggcggcgacgggaccagcgaccccatgcaacacatgcgagcgcatctacggctcttgtgaccatgtagatggtgaggtccattgtcctccctgctaactctgggcggtgatgttccagcgaattggccataagctgactggagtcttccccctgatctgtggagttccggatagttctaacatcttctactggcagacagatgcggttcttgttgagcagttgaaaactgaaccatccagatagaagagagatgatgaatctaattaagcggtccagcctttgtgagatccgaacgtcacgcttggacagacctgccgtgatcaatgcacacagacgatataatcctattggtagtagggttgagccaccgaccagggaagcacaagctgttgggaaactgttcagacgtaaaggactagccaagactttagctaactattcgaggtgaggtcagctatagcattccgtttgtacaatagactagaggcaagggtgacaagataagtcgcgataagagccccatactaggtaatactacgacgtacctcttgaagtttctgttgcgcagtccaatcgttattgcgcagtcggcggacataagacaacaatttcggggtgacagaagataggtacccgagtgcatatgcgcgaaggaggctacagtcgtaatcagcaagggctcttcagatcacacagttgcaccaagccacaagggtaacagatcgcatggactcacggcttgaatatccggacgttgtcccttccatggcgtctccggagtgcaggttccatgctgccggaaaccttcatgtcatgatccgtcgggaggtgtcaacatcacagtcccccggactaatcggcgacgaggggtcagccagctgtaaactctggtgggattcacaagaatctcctcgccaattagggaatgaggtataagagctcaatgggttttatccgcgggtgacctacaattgcacctcccgaaaattgggtagtattctccaacagggggaaattgacacctacacgaccgttttctgaactatggatcaagtgaactccgtgtaatgagcctgttagagacttggtggttgtacctcggtccgtacccaggtgggaactccagaaaagcccccgcaaacaagatccaaaatcgggggagggacctgtttcaagagaagacagagggcgatcatccgaagcaatgagccttttccctttcggagcagattagtcggtattgcggggctaaacaaggcgaatgatctaactccaaccccataataagaggatgatctcaggagaacaattcccaaacaaggagatgaaccgcactgacccaatgatccttgtcaataagaacgagagaaaggaatatataagagaaagggcaaattgtattcgaatgtacaccagaaaacagctggaagagagggtatctgcagtgtactttgcgttgacaagtcggtgcttctctcgcagggccctcgggaagggttctccgggagtcaacagctctccccaggaacgtatcaaataccgatggtaccatataagccacagcggaaccgccgtaatttatgtactgttacgtcacgcgctcaaatttttgcatgtgatcaggccgattgcttttgatgcgaaactctccacgtattcttctataggacgcatctctcttgctttcgggcactctcttgatcttcttcttttgctttctttcttcgcactttcttctggtcttcttgttcctatccccattgcgctgaaccatctccttatcgagtcgcattatcagccctagagaactcccgtggccttgatctacccccgcgttcctcttttgtggagtcaaaccttggctatcatctcgagcgcatacaatttttcactccattccaaggcatgacagtgtcgccttggtccgcgctactctttccatcagagtagcaaccgttttcttgacaccctgtgaatattgaaccgcttttcactatgaatggacatggcactcaagttcggactgggcgcacgtctcccccggctgctccctttggatgtgagtcgctccgggcattatttgtaccgtccactctttaacccgattccagactcgtttctctcccccatggacacaccctttgaacaggcacctgctctacccccgggaccttctcttcttgacgataacgaatccaatatgcttgataacttctttactaccatgaacgcaaaccactttacgaatgatttctggatgcgacaagaacataaatccgggacacccaactttgactggtcaggtgagctgccgcccaacttcgaaggatcaaccacatccctatcgcagccctcatttcagcagcatgggctagggaaagcagccgggggaatcataacagacaatcctacaagctcggatatattcgccgcagcttccatgctctaccacagtggtctgaacggatcggagttaggatccacgttagcacaacaggctttcgcgggacagtctctccccacccatgggatacaacgaaaaattaattcacatactggcagtgtcgcacagggttcagcttcatctccaccccgggctggtgtcccggttggatatcatacctcggagatgttttttgacgtccgtgaccccattcctgcggaccaacatccatcaagaaaggcccgcagtttgcgatggggctcagatgccagttttatggaccagggctatcttcgcccccctgatcagcctgacgaggaacagcggacaagtgacctgctcgatcatctcgggtgctttgaaccacaaagcagtgcagcaaacacacgagcacctagtccagagcgcatggttggggctcctcctcaaggtgccgttttccgaagtggagctgtcctggacgagagcttacatccccgaaaacggccaagaaccgccctgaaatatgagggtgacgaagactccgatgaggatgatgcacgacctcactcaagaaagtctagaggatctatcagccaaggccgacgagcatcaacggacatgtctcgaaaagcccgagtacagccagggtccaaaactgcgcgagagaatctcactgaagagcaaaaacggaccaaccatatcctttcggagcagaaacgtcgaaatcttattcgccaaggcttcgaagacttgtgtacactggtccctgcgcttagaggtggcggattcagcaaaagcgcaatgctcactggagctgctgactggcttgaagaccttctccgggggaatgacatacttcaaagccaactgcgcgaattgaagggcatgaatggcttagtgatgccgcgttgataccctctgtcgcacgaccacaacgttaatatatgatctcatggatagccctgcctcttttcttcgcggggattgcaagcgtttcagcgggacagttttgtgtatgcatgtcggcgagttggcatttcatctttgcaaatcccggcaacaagataccatttttcttttctctgcatactctttcttcgtctttttttcccctataaccgctgtaggtgatacaagtcatctttcggctggtcctcggcaaatatcgataccctagtgcataattcgaaaagcctgtattgaacatagtttgagtaaagacattatttctttccaaatagttttgccaatataccaagacatagctttccgcatagcacataaatacgcacgtttggtcaagctgagacatttcagcgacaattttggattatttcagttttcatcggttttcaatttgaaaccttagtacggacgaatatgctaataaaggccaagactaccaagaccctgtgggttggcatgctatctactccgtacttccgtagtatctccatgttttgtccccaccgctctgtattgcccgcatgtgaagacgcgtcaacatccttagttttgtacctcgacctaacaccctcaactcactatgcctccaaagcgaaaacacacgggcgacgatgccccgcaggaggacgactccaagggctacgcctatctcaaaccgcacatccgccgcgtcccagagaaaaccatcaagtcgaaatgggcccctctaccggaacccgtccagggaaaggtcatggacatgttccactccctcgagcgaccggtgataatgcggaatcaaaatgagcgcaagcgaatcgaggcgcagggcgccgtgcaagcggtcgtgcgaaagtagggcgccgtgcccagtctggtagcttccacagagctaccagtgtcttgaaggacgatgatactaaccgtataccgcgtgttgtttagtctaggcaaaagactcccgcgaatgccgtttccgcccataacaaaggactccaacttcgactacgaatctgccctgaatgagcacgtatgcgaccccctgcgattgtcgacagcaagtccatactgattacattcttagcgctcactcgaggcccacttggctacgatgaatgatagcgtcgatctactaaaagctgagattgccaaagaagaagcgctccttgctagggaaacaaaatcgctccaggaaatggacaagaatgcgaaacgggccgaggctgaaaggaaacgacagactaagaatgtatgcagcagattatctcgcttcaaaatggactggctaatgttttacgaccgtaggaacaccccgtgctccgacagttggatgcacttcctcgaactgaggattctgggtcctctgagttcatgcttctcggcgcgaaagatagtcaagtgacactagatgaggtacggactgcttgtgaaccacgcgtgcttgccctgtcaacttaccattctatttgattttagttggagaccgaccccgaagtccaaggactcatgaagcaactacatggccatcttcaatccatggaaagcaatatagcgcccttcgcaggactcggggatgccatcactcgttcacaagctgccttggatctatactcgatccccaatgactgattattgctggacatcactgcacttgcaagctaccaatcccggcattttgatgcttcttatgattgacacatgaagggcctcggacccagggtatgcacatttattagaaactcaaaccaagtatcgcccaagcttggcgatcaggaatcacataggcaatcctggtcgcgtgcttaactccaatgcattcgctgaatagctgcatacggtggaaccgcacggtcgaacgcacctctgttcaacagatgataccgactgcaagggtaaaatatggatcaccctaaatcaagagaagggtaatgcagatatgttgcgcacctagtacaatctgaggagtcatgctctaagggtgatcagacaaccgaggctccaccgcatgaaaaggggaagaaactagatcaataaacacgagcctccaccttttacacaataccaatgtagtttcaatcgaaatccgatcaattgtaagcatagaaaacgcaattccgcagccgaggtggtctcgccccgacagtgacgtgtgcccaaacagccaaccccatgcggagcagttcggaggggtgactccgctttctccatccccaagaacttttcgacgtttaccaactactaccaactggtctgcaggcagccattccgctccggccctggtggttctcactgaactcttgcgcaatgtccgaaaagaatgcgccgctgggcacttccaatgcgacaaaatccagatctgatgcagggaaggatacgagcatcaagaatccgcaaacagctgcggccaaggccgaaacgaccggctcggggagtcactccagccccaagaagcgccggaaggtgaatcacggtaaggtgccgttgcgcagcatgcgacagggatctgggcgcgtccgatcctgttgcgcatcaccacaagaacattttcgctaacgcaattccagcctgtgtatattgtcgccgctcggtaagttaacttcttgggaatgttattatacttggttactatatgcgatacgccatgacatcaatgctagcgcatatctattcaaggaactggctttgctaacggggggttttgctcgcgtgggacagcatatgacctgcgactcggtacgacacctctgtctccctttccgcgttcgcgacccgtcacgtctgaaactttgatcgcaaacctgcggagaataatttgcaccagctgacctgtttaattctgaaggaacggccctgcacacgctgtataaagcgaaacatcggtcacctgtgtcatgacgagccgagggaaactgcgaaacgaggacgtggcgaacacgaacattctgctgcagacgacgagggctcgtctaacaatgaattgggctccgttcaaggcatgcctacgagtgtcgacatagccgatgctgctggtcagcaatcattccctgataccacgatcggaattgcaccctcagttgtgaatccgccttcaacggtgccgcctgggaatctttctgcgtctagtcagtcactcgaggctacctctcagcgtgagttcgcaacaaaacctgttttgccgccggactcagctaacgtggtacgatagtcatgccatacaacgattgggtaggtggtcagaatcagttccaggacatgcattctctccacccttcctacatgtttaatgcacacgaagtgaccaacgagtacaatctgctcggcgatttcctcagtaacagtctcttagacgacggggcaatgttccaaaatcaagatatgcagggaatctacaacgattcgtcgttgatgaactcgatgaatggtatgccagcaccgaacgggttgcctcctccaacacaacttccgccgccagcacagagccaagcactgccaggagactcgattcaacgctcaacctccgcgacgggtaatgacaaagcccgggaaacgtactacatgaccgccgccgacccggcaggaactgacccaccagaggagcggatgaacaagcttctcaaagcgaaatatgatgccggactactgaaaccattcaattacgttaagggatatgcacggttgaaccagtacatggaaaagaacatgcaacaaatatctcgacaaaagattctgcggcagctcgacaagttccggccgaagttccgagaacgcatgcagagcttgactgatatcgaactgattctggtggagatgtggttcgagcgcagtcttatggagtatgaccgagtctttgccagtatggctatcccagcctgctgctggcgtcgaacgggcgagatcttccgagggaataatgaaatggcacagttgattgatgtcccggttgagggtcttcgagatgtaagtttcaagactggagactcgccacgtcatattacacccaactcacatgtttactctctgtagggcaaacttgctatccacgagatcattgtcgaagaccagctggtcagttattgggaaaagttcggcgccattgccttcgacaatactcaaaaggctatgctcactagttgcacgctgaagagccctaaccccaactcaaggagtgacggtataacttgctgcttttcgtttacgatcagacgagacaatcacaacatgtacgtgttcattgctcaccactgtccactagatactgacatgccggaactaacactgtgcagcccgtctctcatcgttgggaacttcctccccatcgatagatagtacttttcggtagactgttatttattccatgacacacaaggacttctcttttggtatcatcgtttgatttagtgattccccaagttctggctgtgctcctcacagaaaaatgtatagtgcttgattttatgtgtataacatcaaacagtatgttttgagtcaaatcatatatacatacgaagtaacagggtctggtgctctgagtagtgtaaatgttctgtttgcaatggtcaagggacgacacgagcactttgggtttgactcgtcgtctctttcgtccctccacgctcttccaactccaaacaatcttccctctcactttcactttctttcttcctcttctcccaacctcttcgtaaccttcattatccccttttatctttcttttcatcttttctcccattggctcccaatccccaagtcttctctccatggcgcaaccgtctagactacacccggctctagctggtacgagccacacatcatgtccccgctatgcgcagcagctgacccccatattcttctatctaggtcatgctcacactttgcatatagccttatctacagtcggaacctcgagtcctctccttcctcccaatgccatttccagactggatagatggctcaagcgtaacccgtttgttgtcatggcaaatacatcgagtcgccagcagctggatatggttggaacattactctggaatgactgcacccatctgatcagcttgcgtggtcaaaatccggaggatatgctgattctcggcaaagtgagggctttcgcgtttgttgtgttgaacatggctgtcatgcctgacctcctaggtttttaatggcctctaatatatgttgaagtgaccttatctaacctcttacaggagacctccgggctctcgatctggccgtcaaggctgcgcgtatttgcattggtataccatcttacatctcacttgatgacttgatcaggtctaacgacaagaacagtgaaccagcaaagcgaaattgcggtaaatatcttgtcagtggcagccacgaggttgtcaaacattcagcctgctcatctcgggcttgacgctgcgattaaccgcactatcaccacccaatacttgttgctccgtatgcgactggtgagttgcattgcttgaacactgctttgtgtgtcaacaccagaattgacattatttcaggcctggttgcatgaacgagcagatatcgccgagcatttttatggcaaactccctgtcttgcataggtcgcatgatgaagagtggattttcgagacttgctttatcattggtgactctgcactcgcacggcgcctgcctgacatcgctatcacatggctgcagagagcgagcgatcacttgcagtccttacacatgatgattaagtttccatattattatgattgggacttggttattcgacattctcttggtgggtgggttgatctagttgatgacccggactaacatgctgcagttgtggcttgttcacaagtcaaaatccctctggcaaccgccatctacgattttgaaatgagctacttgagagaagtacgtttgtggtgaatgtggtagacttgaagctgacctttttagaattacccatttcaccctgctgtgatcctttttgatctatctatgggacatggcaatcctagtaatgacggggcactacaaggtaagactgatctttatcttgaatggaattgaattaacaatattgttgtagccctagagaggctggttgatggcatgacccttacagatatgaacatgccgatgtgagttatcccaattatttactgtaatttttgataaatgttaactgttgatccagaattttccaatatgcccgatctctgggtcatatagggtaccttgatacacctatcggtgagagactttgctgacagttctttagtggttcggatgacggaatggaagcacttcgaaggctgctcatgcgccctctgccagcaggagaatggacagagaaatgctttgttgcttttcttctacttttgagcagatcggacttgtctgattctacgcgtattcaggccctccaggatgtgattgactcactagagcgacgtggatatccatcttttagcagtagggcatctcacgccacattgattgtaaggcatactcaaactctcatcatcttcaattcaaggagctgactattatatacagtgcatctggaaaatgactgctggtgcaatttcccggaatgaccgctggagtgcaaggctatggcttcagttgtgcagtcagccaaagatcttccaacgctgctccctgcccatccagattgtgatacaaaagttagtggaacaagaattgagatttaactagcactgtgagctgacatatttcaggaagctggttgcttattacatagaggctggacagcttgccgacgctcgttggttaatcgatcggggtatagtccaaagccaggaagattgccaaaggatgtacttgtcttacaagttgacattgctggagggaaaaagcggtgctggtacgaatattctatcggaaaccaacgcttctggcctattctaactatatgcaagcgcatttctatctcggctttccttcgcatcccgtgccgcacaagcaactgagccttctttcgtgcgcaatggaagctcagagacaacacaaaccagaagaagtcctgaattgtcttgaaccatttatcaactgtttgacttcagatgacatttatcatcatgactttcccgccgccgaacatcacatgtgagaatgtttcatatttttgactcgctatgcaaggctaacttgcctactatgaataggtttgccattactcttctctccgaagagctatccaagggtggctttaaccagagacttggcaaatgcatcgagactgtactcgaaagtggtgcgttttcccccaggcaatagtaatttgtgatgctaatcgttcaatagccctgtcttatgccaaagaaaacagcctgtttgaaggtggcgatcgggaggtctcagtcactcaactggaatggctgtatttggcaacttacaacgttgctctgaaacttatcaactcttccggattcctgtcggctacgcatgccttagatcactccagagatgtctgtttcgaccaggcaaagtttttgcttggctatgttttactaacatcttttcagtttgcgctccagtatcgtcagattgaataccctgaggggggctccaaagcaccccggccgcatttgttttcggttatttaccttcgtctccttgttagcacacttagggcccgctgtgctgatccgactgcaaaggttagttacatcaattcttgtctacaacatattatcccccgaaaatgttgcaacgttatagtcccataatactaattgtctgcagaaaccgcactacgaggatgtatgcatttgttttcaacaactaggtgacttgcgtggttgggaagatggagaagagacagacgctggcgcaaattacaaagaagaaaagcactataatattgcccgatttttcaaccttgaggctaccatgcacctcaacaggtggcaggatgttgtcaggatatgtgcatccgatgacacgatccctgattcaaagttttacccacagatcatggatttgactctccgattgaacctaccacccacatgggcgatctggcttatcaaggttcgttgtttatttattaccgggagactacattctttgaaaaatactcacatctatacaatagcggatcgtgtcgaaactcaacgagctacgggacgatccccctaccacatggcaacacgagttccgagcctccctgcctcgttacctccactgtctattcatactagccattgaaccggacccctacgcaagcactgatagaagtgccaatcttggtttcaaaatggccgatgctgaagttgctgaagaagtgctcgataaaatcctcgcaatggcagacgaagaggcagccgttgcagaggaaagatacggtacacagcacagcctcaatgccatccaggtcgggtcggagatggattatatgtttacatatccagcgggggaattaatcaatgttgctaccatgtccttcaacaaggctattgacttttaccgtgctacgcgggaccaggattgtcagcgttgggcggaaaaagccattcgtgttgcccagcttgtgcctggtgctcagggcaaagcgctggtcaacgtacttcagatcagactgggaagcttgattggagtttgagttggtgttggtattggtgggctggtttgggctggggtgggtatgtggttcagataaattgtgacaaggtggaggattgtgtgtgtagtgtgctaggtacttgatatgaaattgaaaaactcaaactgattgttcttatgctttcccgatcaaaaagaaatatgaagagaaagaaaggattgatcttcgtggcgagatggcctatagagtataaatatgtgggtatcatcagaagggaaatgatctctgagaaatcagaaagtagaaagcaaaatcgcccaagccacaaaatccggtagatgatgcaaagatgcaatggaacaaaagggagaaatcaagagaatgctcaagtcaagatgtcagtaaataagaaagcaaaaagaaagaatcaaggaaaggcactatgaaagcgccacagcaattccacgaaagccataaaacaccaaaaatgcagtctgtaacttttccgaaagcagaataaagatccccaatgggataacccagttcattcctccccatgcgcatcgcaggaacggctccgcgaagcctgccgcacccccttggaccgcagcgacggggtagacggcatacgatgagggatacgaggcaacttgggcatggccgagtagctctgtttcggctcccgctccatgtccttaccgctactatctgtctctgtctcgccgctctcatcgctgctttgtctatgaccacccacaatgcggagtgtgagattgagctcgcgctcgagctccttttgcgcttgcatgcgctgactcgagccgttgagtttcttgcgatacactcgcagagtccggcacagctgctcggtggatgtgtctaagcttccgacctcgctgcgcggggttgttttcccgcggttgcggaagtcgatggatgtgcggcggttgctggttcttgcggtgtgtggtttccggggtgttggggtttttgattttgggcttattggggatggggaccgccggtgtcggtcttgctttgggcccggggttggggagaggcggtttggaggggaggatctttctgagacggcgtggttttttagtgatgatggtgctagggatagccgagacagcttgcggagtagagttggagagtgctcgcggataggtgttggtgttggaggattcgggctatccggtcgttgaaatccggcgagttcgctgcgggaaaggacttttcggagagggggccttgccgctgtcatttctttgacggggcattcgtcgtcctcccgtgtgtttgcaaggtctggggagacctgttgctggacagataggttccatatcatcacaatcccgtccataccggcactcaccactgtgcgcttggtttgggacccatcggacttatcacgctcctccagaagtaacacatcggttacaccttctgtatggccaaattcaccagtaaggagctggtctcgctctagatcatagacgcgaatagatttatcggtgctcgaaacacctataagaaccttcggagtctggcctgagatctcggaggcaactgtcaaagagcccaaaaccaccgcatcagctgtctccgaatcagatgccttgaaactgtgaagttgacggccggttgggatatcgaatttcgaaacacaacggtccatggtagaaaggtatagaatgttcgagtcgtcgggacagagtgtcatcgacacgggggaagccttttgagtgatgacccttgagatcagataggcaacagatgtgccacaagccacctcgcgtgtcgcgcgacctcttatgacaacggtgcgatctgcggagcacgaaagcaatttttcaccttcgttgatgaacagcaactgattaacagccccgacgtgatcgtccatggtttgaatcaactgcaactcgttgtcccgtgtctcgaatagttgcaccatccgatcacgcccagaactagctatcagccaggtctcgtccattttttggatggccacatccgtaatctctccgccatgggcgcgcgcctcgttgaggcaagtccagtcggcgttcgaaaagattctgcatcacagtcagctaaagaacattcggttcatatcctaattttgtacatacctcaacacaccaaacttgtcaccagagacaaaccagtccgcattctcagcggtcctcagaactttgagttcgtttgccgcatcgtcttcttttccgggaaattggtcgagatcgatattcttcgatcctcgacacttcccttgtgcatcccaaaagttcaccgtaccattgcgagaccacgtgaagaagtctgcagacaagttattgggaaaatccatgcgacaaataccgagaatcgggtcccgatgggccggcatggaagcctcgcctgcctcctgttcaccatcttcacctagagtgtcaatcgggtagacatgaatcgcgcgggttgattcaacagtaaccagatgagaactaagagaccccatgcaagtgatcgccggtgccttgcctttcttgtcaagtgcactcttttcaaggcgcgcaggagaagtcggcgtggatgttccacgtaagacttcaaatgataatcgctgcatttgccttcctcctccacctacccatatggactcttggtcaaagtccacggccaacgaagtgatgctgaacccaacttgctttaccgtgatcagcttctgagatccttcacgatcatcgaaaaagcaaactgcgcctgaatctgtgccgattacggcctcgttttgggatatactgctcacacaggtgaaagtattatcgcctagggtgcccagtagacaattcctgccggtaagtgcttttggggcaaaactgggcgagagggcagctacctcgacattcaaacgtgacttggtcggtgaaacaggccgaatcgccgtgggaagacgccagaccttaacatgccgcaggccggtcctaaagaaaaacattagttgactgctaagtatccccatccgatcaaacgtacgtgaccaaagtatggccgacccagcacatatcattgataaatgaggtgcatttattcacagagtgtaacttggccgagccattcttgaggtttactgtccacataaagagaaatccatcgtttggattgccgagcgtggccaaatattgagagtctgggctaaacgccaggctgcgaacaccaaaggtatgctcgtttagaatggacagaggaacatcaggtaaggcatctctcgctgtcgaaaatatcaagactcgaggattatagccagtcttgacgtcgttagctgccgttgttgtggcaataatttatatctcgattcccacttacctctcccactgcaaggaatcttccattcgggctgattgaaacactcgtcactgctttgattctttccctcgaagaccatccacgtggactgccgatgtcgatgacttcgctcgacggagacccattgacattaagatgcggattcgaccggatatgggaaagggatcgtgatctggggtccgggctgcccgggggagtcgactggttgtaaaaagaagttgacgggttgacactcgtcgcggaggggcgggctcggaagaagcgttgtgttatgttgtcgttctcgtccaattctgcaagaaccgctgctgatccagcacatagcgcaaagcttctgctctgatcatggcatgaaaatccgtttggggttgtagttgttgtgccgatgacggtttggagggacaaggaggattgatggagggtcttgctgggggttcgtgtccctggtcggaggactggagagttcgaaggagtgattttcaaggatgcgctgggtccagcaagcttgctttttgcactggggtgagcggtggtggccatatcctcggggaggcggtcggcgcttcaatgtcctctaagagcgtgggatatttgcatgtcaagcaaagttcatcagacaggtttgaggatgccagtgaggctgtagtaggcgtccggaatttttatgtcggagagtcggtcaggagacagtgtggaggattggtagaattagtgggggcaagctaggatgaagctctgatcagctaagtccgatctctatccacacacacatctataactcaccaaaagagggtataggacgagaaaagtcaacaaacacgaagctcattccgcactaaagcagatcattccagtcagaggaatctgaaccttctggatgcccctggctccatggggttatttgggctttttgcttggcttctgattggcctcttggatttgaggaattaccggattctcacttttgagaccgagggacttccttcgatctgcggaaaagcgtgatatgaacggtgggtcgtgtacgcacaggtcgccgcactacccgcaccatcggctcagcgtgagctttaatgggagtatgctatactccgtacgttggatgtgattaaatcgcaagatcacatcagatcagatcagatcagacccaagggaggctcatgggaggttccactaccgaaggcccacagctccgattgctcgtccgatcgttgcattaatcttggaagtttcctcgattcagtctcacgtgcctggaatacgatctcgtgccccccgatgccctaatctcactggcacaattcgacctgtccattgcgatacatcggcagctccggtgttgaacttcttggcaatcttacatgcccatttctaccaatcaaatagatctgtaccccgtaagcacgaagatctctacacatgtgggatctaacccgtgacaatctccttcaccatcatccacgtagtagctctccccggaatttctcaggaagctccatgttgaaatgcaaccttcacttaagataaagcgagtagtcttggtaagctttggaaggtttcgggtagttatccccatatcatatgacttgctattatgtgtctttttggtgtctttcatattgctcttcgtagaattctgatactatcatgtggcttttgtgttctaaactaccacatagagtcatcatagagcatatacactggtaaagtatcaattaaatacaccgagagcgtatacatatcgtaggcaacttgatacaattgcagaggtaaaactataccgcactttcaaaatactacctggtaataccgcggtggcatacttagtttgtcgctcgtactcgcgatagtcgcaaactgagagatcgcaatagatggggaaaagaatgaagatcttattttatatcttgggttatttgttactacttgcatatcatcattcgtagcctttagtatggaatatagcagacatgaatagccccatggtcttatatgagagacgtacagcttatgttgccgagttatgtatttcttgctctctccccctgctactctctttaatgtctgatgtcaccatgtctgttcaattagacaatcgccagtcgattaatgactattgccgttcttatgcagaggatcaacttattggaggcacgaagtatggcaaccaggtcgttaaactaccgggttgtgacttggtggttaagttcggccgttaagtctccccctacgaggtaaagaatcagcgaaaagcgtaaaaaaaaaccagataccattatagtcccttaggttcattcattttttataggcaatgagggttggggctatatagtatcggatttgattccgggcaaaactattgatcctcttctgaactcttacattcttagactcgctgagtattttcactctattaccgccgatagcgctggtagcctatgtggtagcccgtcaattgacttactctggcccgagtcatacctagtaactggaggaatggttcaatagccggttttccccaaatatggcaaggctcaatttgatcttagcctattggtattttatcatttcaatatagcccctccaaagcttctctggttagatggtggccgtatttgtttattagactgggcatcagcagggttttatctgaggtcattggaatttgccagtctattctttcaagaatatcattccagccagacgcatctgaatgccgtcggttttggctctgggcgtgatgaagaagagctgctgctaccaggcattatacaacaatgaaaggtcctccttataagtcagcagaattgcttgtctctgtgaacaacgctgagccgaaaaccagtcgttcgagggacattttagaatggtcttcgcaccatcgataggctgattccacctttccttttccactactaccagcaccacaacttctgcgttgagaaagggacaaccttctaatggtaatacctaggtagtgtcccataggactagtcagattatcagatgagagctaaagcatgatcgatgttggtacaacttatgtcggaaaaaaggtaaagaacgatgtatatagttctggcgtttagcaatgcaattttcaatacaataatgcagctgctcgatcttctacaaattaatgtatagagttacaaagtcttatcaatagctattgacaataaattccaacaacgtgcacctgtatgtagttgctgagatacaaggaggtcttgctatgtattttggggctcgcttgttagttctcttatcgccacccggatattttctcttcgatgacctctggaacttccagatctcacattatctatcaactttgctctgctcgtcactcccttttttcattcatctacaacatattcccaagatggctaaatgtgctgcctcatcgaggctggccctgcctgccgttctgcgcaatgttttccgctctcagctcaccagcgcttcttcaagcccctatcgccgacctcttgcctccggtccttttttctctttgaatatccatcttcagagatccttccgttcaatttcgcgcttgcatgattctcagaatgatcaacaaacacccgcagcccctgaaaccacggctgtcgccgatgacaccctgccttctcaacacaaaaaaccaaagaaagattacgactcattcggcaagacaggtggttggaatactcataaacgccaccccaaagatcaacgaagggaccctgatagtaccggaagaaccgacagagagcgcagagctttccgcaacgagactcgcagggaggtgaaaaaagaacctcgcagggattggcaagacagagccgaaaaatcgaaacaattctccgagaacagaggaaagagaaagcccgagaactggcaagtgcaaaaagccgctctgaaagagaagttcgccggtggttggaatccacctaagaagctttcacctgatgccctcgatggcatccgtcatcttcacgcgaaggcacctgaacaatttacgactgctgtcctcgcagaggagtttgagatgtctccggaagctattcgccgaattttgaagagcaaatggcgcccatcggaggacgagatggagagtcggcgcaagcgatgggaaaatcggcatgatagaatctggagtcgtatggctgaacttggtcttcgcccttcgacaaaccgcacgcgaaacctttcggatttccatgtgctgtatgatgacaacaatcgcgagcgaagatagtcgtctgtgtacatgataccatgctatatatggggttttgagttgcgcttgtacaataaataatataacctagaggaaacaacatatctcttataactagtaattggttgcagtatggagtagggtgggtatcatggcatttagcccgtagttcggggtttagttcggggtggagctaggagcaaggatatcgtcgccacaactcccccggcaacacatcttcaactctccaaccagcatggttcattcgagttgacagaatgctaatggcggcatatttcaccaagcttcgacctaattacagctcaacgtgccggcaattccctccagaccttggccctcgaaccgcagcccacatgctgagacaaccgccatgccatccaacatccaagtcttcgtgaaatggaaggaccagactatctttgcaggagaggatgtagaatgtactataacattcaagaacgtggccgatactggcgccgatgccaataacgcgggtgaaggacaacattcacggaaggtctctcgagtcgcaaaccacacacccaagtcgaactcggaatctttcttcggatttaaatcgccccaggctctcttttccggtcggcgatcatactccatcagctcccaacggaagccttatcaccggacggcctcgtccctgagctcttcgttggtcggctcccatagctttcctccgaacagcggcccctctacaccgcgagaatggcaacaaggccacaaccataaacgatccgtctcaatcctctccattgatagcgaaggccagaccgatccgacaccttctccttacaatcgacgtcagccagtcaggggtcatgggcgctcggcgagtctccaggttctaccgcggaggaacaatagctacgaggattcttacaaaaaaggtagatgatggacagtgcaaaacatgcgaagggattttcaactaatgagtgtctcgtatcagcgagaactccctctcatatttctccgtttccattgacagaggctcccaacgagcatcccaatggcaatctgagagtcgatacctcccacttggggcgagccacccaacctggctctcgagcgacgagtccaacaggtgccatagagccattgcgtccaccttcccgacggccccaaccacctcccctcgattttaagtttccgcccgcggcttcagccgattcgactaacagtcgcaccgtgcgcaccccatcaccaaagtcggcgacaacgaacggtacatcatcaaccgggggaagacccactctcaaagatgtacagggtctatctggaccggcgcatcagcaactaactcggatcatatcagtcacaagcgtgaacgggagcaaccggagcagtggggagttctactcagtcagcgaccactccaccgagaccctcggatcagaatacacgaattattctctccagaatgggcgagctccctccatgcggcatgcgcggcatcattcaagcgtagttgcatctcctgccaaagcctccaacagccaggcgctgctgatgggctatgcgcaggttaacgcatcattcacggtcgatgggtcgttagtaaaccagtccgccttcgacgaagtcaagcgaaagggagttgttggtggccaaccgagttcaggcggacttcctggccgcccaacgccaacagccgaacgaccacgtaagagcggtgggttctggggctcactcagatggaacactatcgaggaatctatcaatggccttctttcaaataacgagttggacggattacgagaaatgcgtggtgttacatcgtcgagatcaattccgctcttgtccacctcgcagtcgctgctttttgttgacctccgactggcaccaggagaggaacagtcgtattccttctctttctcccttcccaaaggactcccggcgagtcataaaggaaaagcaatcaagatctcatataatttggtcattggaactcagcggcctagcgggcctaacgagccccaaaaggtcaaccgcatcaacatacccttccgtgtttttagcggcgtgaatggtaagttacattctttgcttttccttccatcccaatttctcacgtccttatagaaaagggagacattcttggccatgacttgatgtcaccatatgtacttctacgggatgaagcgaaggtccaaaaggttgggccagtgatgcctgtgtcaacgaagaaccaaagtattagcaagtctcaccattccgcggccgacttccttggttttgtggatgagatcttggagcaacgtgcgcgttccaacacgctgttcccacctggtgctacgccctcgagacgacctagcgtcgaaggattacctcagatgcttacttccaaggatgtcatcgatattgctatccttcgaagtaaccaggctgtgaactctcgccgcagccccaatcgctttgagattgcccgcgagggtaaacgtatcgcagtggtcgtcttgaaccgaccagttcatcgacttggagagaccattatcgccacaatggattttggagatgctacgattccatgctacgctgtgcgtgcctcgttagagacgtccgagaaagtcacccctactttggccatccggtcaagtgccagtattcaccgaaccacacggcgcatccatgcttctctgtttgagaacacactccatgccacccgagtggctttcagccctgctatccccatcacagcgacgccttcaattttgacgagcggtgtgaccctcgactgggagttacgattcgagtttgtgacatccagtgttcgaggcgatcaaggggccccgccatcaggcactcgcttactcgaggccttgtcatcggatgatcgcggcacggtgctgtctgccatggaacatctgaactgtgaatcattcgagattgctatcccgctgacggtttatggagagactgttcgagaacgactgcccgaggagaatgaaggctacccaatctagaactccagatgtacaccacaggtataccagatgaacatgtgcttgcctgctgtgcaggttatgcttgatcttattttgattaaatattccccttgtgccatcgagggagaaactcccagaaatatagaccccaccaggctctagactcccatgtataattgatactatatttgaatcgaaaataacgacagtgcgactgctaccaagtatgtaaatgtaaaatatatcttatagtctgtgacgtcgacgcggtaactggggcaacgcggtcagtcaaccgatcggatctgggcactttatcaactctggtggagctgaaacccgataacatctctctccttgcgcttctctcgaacatatcatccagaattattgtcaggtaggttcattggcattatctgcacgtcagcgcatctacacatctgatggcgtccctcaaatatcggacagcgactagtatctaacattggaatgcaggcacatcgcgatcagcgcaaaccccgccgaaatacacccctaccgaagggattacttttttttcctcgagcctgagagaatatggcttcgttcatcaccaccatgtctgtccccgctacccctcctgctgcccatttcatttcccctggggagcctgcctctcgctccccgcaagcactcccttccgtcatcagcccttccgtcgtgtaccacactactcgcacttcccatctccccctctcggagcctccatcttacctgtcgccggcagtgcgcgcactcaaacagggctgttttggactaacacctcccagcaatgcacgcacacgcgcccccttcaagccccgctcgtccgccaagggcacaaacagttatcagctacgacagtttgccgaggctacacttggaagtggtagcttgcgcaaggccgtgaagttgcccgaaggcgaagatcagaatgaatggctcgccgtgaatggtaagaaacatcttgcggagttgtactgggggtatctgctaacgttttggcggtctagtggtcgacttctacaaccagattaacctcctttatggctcaataactgagttctgctcaccgcagacatgtcccgagatgaaggctacagatgagtacggtgctttttcgacagctcgttgaccccagcttacacgtttggataggttcgagtacctctggcaagactcggagaatttcaagcggccaaccaagatgtccgccccggaatacatcgaacatttgatggcctgggttcagagcaacgtcgacaacgaacaaatgttccctagccgaatcggtgtcccattccccaagaccttccctagtcttctccgccagatcttcaagcgtctataccgtgtctacgcccacatctactgccaccattatccagtggtagtgcatctcggcctcgagcctcacctcaacaccagcttcaaacactatgttttgttcatcgacgagcacaagctggccagcgggaaggatttctggggaccgctgggtgatttggtcgatagcatgttacgcagcgactaaggattgaatcgggatattgggtagtgattgtgttttgcatctgatctccgcagtcagggatactggctgttctacggaaaggtgtcttaatggcgtttcgggtgcggcatgcattgcagtattttagcatgggcttttggcgtttggggcttgacctgacgcgaagaccgaagcgatgaatccatgtattttttttttctgatttggtaacaagaacgccttgatggttattgtaggttatcgcagatgaatctccttttcagtctcagcctcgggggaagcagatgacaaaaagagacaaccacattgttatccttcttcctgttaaatccactctccatactccgtaatagcctacgataacctacaatacccaatcattggtaggccaccagatgcactaattatagctaatatgccgctaatctgagatttgatcaatctcatgtttcctgctgcatagttgacccgaaactcgatggatctccaacatcactagcgtatggatctcgcaactcctttgagagtcgaagatatgcccagccgccaagcaattatacagacacgtgacttggtccttgtgtgcgtacacgtgaccacgggaacattcggcccggaggtctcaaccttgcatcctcgagaagcaagcactccgaacgtcgatatcacctcctcaatccaaacctctgcgtctctcctccctcctcgaggccattcctccagccaattgcacaatgatctccgctcgcttcgcccgcgctggcctgcgtgccacccagttctcggttcctcgcaccgccgccgttaacggaatcaggacctatgccaccccggcccaggatacccgcgcccccgtcgccctgttcggcgttgatggcacttacgcctctgctctggtatgcacctccattgcctcggtcttgtcgcgaccgtgtgcttcgccttttcgcgacgaacaccccgtctttccccgacccctcccacactcttcaaagcagtgttcagatcctcatcaaaacactgcaagcaaaaacccggaatgaattacccttctaaccatcctcgtgaatagtacaccgcttccgccaagtccgctgctctcgaccagactgcccgtgctatcgccaacctcggcgagaccctcaagggtgacaagaagctcgtcggcatcctcagctcccctatgctcaccgacgaggacaagaaggccatcgttgaggagctcttcaaggtcgccggtgctgacaaggccgacaaggccggtgtcgtcaagaacttcctccagactctctccgagcacaaccgtttcagctccctcgagggtgtctgcgagaagttcgctaccctgatgggcgcttaccacggcgagatcgacctccacatcaccagtgctcaggtacgtactccatgagctgtgtttcactcgcagaaaaaaaaataaggatataagctaaaagtttgtccgcaggagctcgatgccaagaccattaaccgtcttgagaaggccatttccaagtctcagttcagccagggcaagaagctcaaggttattaccaaggttcgttacaatcgatggaatttttttttgtagctatttactaactcattgaccaggtcaaccctgacatcgttggtggactcatcgttgagattgccgaccgcaccgtcgaccttagcgtttcttctaagatcgccaagatgaacaaggctctttccgatgctgtgtaaatgtaaattagcctcagtgtttgaggggatggttagattatagcatatcgtcccggatgaacggtagcgttcgtaggggaaaagggggattctaagattccactttctacctccattttgttttgttctcattacttcaattgcacagattcatctataaatgatgtcttatagatcgatgtttgcctgagtcctacaaggtacggtagacagcttgtctagtgggttgatcatttgactcaatctgtttaccttgatgtttgccgtccctttcgtatgtctggacccgaattgccggtctgatcgctggttaatctgcgcaatgacttttttatttctatatctgacttgtaggagtgcaagagcggtacgtgatacacccacaaggcgagcagctatgtcccttctatttgggagctcatgatatcattgacgtctacttcgctaccaaatgctctagagatcaagactatgctccgaaatgccatgtatgaatgggttggaaatgatagatagcaggagatgcaacacatgtgaaaaagggaagagtaagcacaaagaagatcgtgactgtcgtgtccagaagtaactaaataggtccagaagcaaccaaataggaaagcggccaggagagaagagaaagaagaaagacagatatcaaacgaggacgatcggaatgcaaaagttagacagcatccaaagccgaagagactgccccattctactaattatccctgtcaacctgcgtctcaaactcatcctcgtacgcagcaatcgaagcagagctgcgcactctctgcagctgactctccacatagtgattaacatgatcttgggcatcagcgtccgcagtactacccctgcgactgggcccacgactaggaccacaactctcaccatcatcatccaagacggtcgacgcagcgggtgtaacatcgccggagtagaagtcactccggttcccgatggagcgagtagtcgacgagcgacgaacagacggacggcccgagctgcgcggtcgtccagaacgggagaagatatcgtcgaagtagtgcgacgcggcggcgaagggcgaccgcggcgtctgcggtagacgacagttgataccggtgtcgtggatgatctttgcgatcagacctgtccatccgcactggtgcgatgtccccagcccgcggccgttgtcgccgtcgaagaactcgtggaaccagagattgtctttccagtgctcgtcgaaatcgaggaggtccgagccgccgtttacagcgcggcggccttcgtcgttgcgggcgaagaggtgctgcatgcggtgctgcagttcttctgctacgtggccgaggttcatgtagtcccctgaacccttgggacactcgacttttagggtgtctccgtagaacatgtggaagcggaggagggactcgacgaggaggaagttgacgcagagccagatcgggccacgccagttgctgttgccgccgaagagggaggagtcggagtcgccggggacgtagccgaccttgaaggtttggccgttgacgtccatggagtaggggtggtcttcgtggtacttggacatggagcggataccgtgcttggataggaactctgtttcgtcgagcattcgctccaggatcttgacgagacggtctttgctgacaagggccagtaggagtcggtcgtctttgccgcggcgcttcatgctggcgatgttgcgctcggctatgtctggtttgttctcgatgaaccagtccactcgccgcttgaacgaggggaatttattgatgagctcgggctctagggtgagaaccgcatacagcgggatcaaaccgacgagggacctaatgggtagctgctgggtccatggcccgccgtaggagatggcatcgtagtagaagctgtcatcttcgttccagagggactgcacggtgtcatcgcccgaacggaaggtcattgcatcactgatgagcaggaagtgctcgaaaaacttggatgcaatgtcttcgtaaatgcgacggtgcttagccagctccagggctatgttgagcatagtcagacagtagaaggccatccaaccagtactgtcagcttgctcaagcacaccaccagtgggcaacggctccgagcgattgaataggccgatgttatcgagtcccaaaaagccgccctcaaacacattcttgccaccggagtccttgcggttcacccaccaggtgaagttcagcagcagcttttggaacacacgttccaggaagtccagatcctgtcgtccgtacatcttccgctcaatcttgaacgtgcggaacacagcccatgcgtgtacgggagggttcacgtcgccgaagttccactcgtaggcaggcagctgaccgttcgggtgcatgtaccactcacgggtgagaagatcgagttgcttctttgcgaaatcgggatccatcatagccagtgggatacagtggaatgcagtatcccacgcagcgaagaatgggtactcccaagagtctggcatcgataagatgtcgtcgatgtacagatgacgccactgctcattgcgaatgccctttcggcccgccggaggaggaatttcacctgggtccccgttgctccattgatcccagatgaagttgtagtactgcttgcaccacatcattccggagaaagcttgacgctggatgttgcggagatcctcgctcatggggagagggttgaggtggtagtagaattcatccgcctcggtgcggcgctgttcaatcacatcgtccagaacttcttcgtcgacaaattcttcctttttacgggacactctgaaacgaacaacggcgcattcgccgggaggaactccctcgccgttgttgaaagcgtaccacgcagcgaacttggtaccttcgttgtctgggttgatagcgcctttctcttcgtcgacaatatgacgatggaatgcgtcttttacatagggggtggtgttctcggtaccccataagaacttgttgttagtctcgttctcggtgaacatcatctgaggcgtaatatcgtcatcgctagatccaactggaggtgatggcgcgaaggagacatatcgctcgccgattgcgctgtgcttcgatttggccaccatgggtccctctttcttgatagatggtttttcctttttcttctcgtcaccccagccccacgtgtttctaaaccagacatgggggacgatgtgtagatgagcaggctcggggccgcggttgtacgcgatgacacggaagagcaattcttcctcatcgtcggcctccttggcagtttcgatgaagatatcccagtagcgattgtcgtcgaagatgccagtatcaaggatctggtactccttctccaagcgtgagcgctttgcattctcatcgatgaggtcttggtaagggaactttctctgggggtatttgtagaggaatttcatgtaggagtgctatactccgggtcagcattctgagataacgggattgaatttaaagaagggtttaccgttggggtgttgtccacatggaaatgtgcctccttgacactctcaccatgattaccctgagggttcgacaaaccgaacaggcgttccttcaagaagtcgctgtgctctcgttagattccatgaccagacacggtcttcgaacggagtctagacttactcttcgccattccaaaacgcaaaggcaatattctgaatgccgtgcgtatctgatacaccagcaattccatcttcgccccagcggaaagttctcgatcttgcgtgatcgtgggtgaagtagctccaggcgtcaccgtcttcgctgtaatcctctctgactataccatggtaaagcggcattagcccgctgtttctcgatttggtatgatttgcagatctcacctgtggcccactgtctctccgcctataccaatagagcttttagcactgccaatctgtctgtttcaaagctatccaaggcctcgacttaccacatagggtccccagcgctgtcgaagtagttagcaggagtgttctcaagctagttccaagttagagagatgttaccttccaatacttggttctctcgcggtcttcctttaggcgcttctcttcctcggtaatgacctctttcccatcgattaagaccataatggcgattgcaaagcagtagccaagttaatgccaaacaaaaaaatatatgaaaatgaagacgaagagagggggggaagcaatcggccagaatggaggggagtcctgtcgaaggtgcagtctgtgccaacctgcggccctggagaaaatgacgtgaatcactgtcccaccggtccaccagtcgaggttcgggtggagaatcgggtcgcattagggaatgagggccgctgattggccgatatgactatgttcggttcgggcctggaaaggtgtgcaggtcatggacctcgcttttgcccgaaatagctacgagatcaattgactttggattagctatataaatagctataagctcttatgtctcgcttattctgcctttgcgtcgaatttgctacgttgtagtgctttacaacaaaactaccaaggtggaaaaagagtccatatctcaccccatataaggcggggaacaaatgaaagatcacaaatcatgatggtctggcgagaactgtgtcgatttggtgatacggagtggacggtgcccaaatatcggcccgattgttctagcgctgaacgttggcatcgggaatgtgttcttatcattttatagcgctgtagctgagacattcatgttacaactaagttgaggcgatatgtagcttgacatagcctggaataagcacagcatatgttataagcttggaagaaaaagaaaagaaatccagagtggattgcaatcaaatgaattgccaccaggcccactccctagatccacctcccatatctctaagacatatgtaccgagcacaacttgtatatccatctttaagcaggttgttttcatacggaactctcctaaggatcggtactatttctaatgcggcagagtctagaagaatcgaaacggttatagcaacctacacgctatagattctctggtgtaaagatgtagattatcctctagcaggctacacaggctacacaggctatctagaaaatggacctccgaagcgaaacccaaaaccataacaatcagggttgtctatattgtactgttgatgttcactatacctaacatccaaggaccttgcttcaaaaatcaagagagtaaccatagcgaagaatttaaatgaaacaatatattctcatgacatcctcgtcaaaccctaagttataggagcccggaaaggattagcttactgttgccaccatgcagagaatccgtaacaggtaaggaagcatataaaagccacaaaatcataccccgcagctctccaggagctgatagctccgtagcacatcaagtccgatcctcgaagtccgtgcctggtttctgcgcctcgaccagggaaacagggacaatgacggaatcgagtggatagttgggcgttcaatttctgactgcacgtctgtgattggacgccattggaagcccatcaacaagtcgcctgcttatcattcggctcgggcctggggttgcaggacaagtcccggaactatatctccagtgactccggagaggtacatcaccccagggtataaatatgcagatagtatctcgggtccgggaagtctgattgaaagaattcattttcaagcacaaaggcaaaaaaaaaaaaaaaaagacatgggtgaatcgcatcgccgtagcagtgcaaatgggggacgatcttgggaatattccaaggccatatccatacaataagggggtctctcaaaggatgctagaaaaaaaaaagataaaactaaaaacatcatccctataaaataaccacgccgactgggacatattgcgtctaccagacgcggcgcgagtccaatatcacggatcgtttgagatttccgccctgatgcgctcgtcccagccttaatctagtcccgactccaggaatccggtggcctatattttgaccgtccagatcttgataccgcagatgttcggaattcagttgtttctccgctgctcagactgctcagattcctcaaactgctcagacggttcagactgctccggctgctgctcgttgttggatccttcttgggaagctgttacacagtcagatcccgctacagcgcaaacccggccagctatatcaaaatcggcccgcaaaaaatcaagttgagcgctcaccagctgactggtcttgtccctggctggtttgggacgaagcgtggtcactccaggtagactgggactggaggcgcctctcggcctcgcggatgcgattctgcagctcttccaattcacgggtctggatcaacatctgttgtttccttggctttgaggttagcgccatgaaaatgagggtcgtgataacagcgagagtcgcgatatcgacgataaagggatgaacaagtgccactcacttctggctaatggtttgcgaaaggttgtcgacgtcagagtccagcatgaaggcgctgtccaaggccgtcgagaatgcttgcgccatggtcctgaggtcacggttaacactactatccgaagctccaacgacaatatagaggaacgaacgactgaggccgaaccttcggcttccactcgcgatccatgtcggacatcgtgtttgatgattcgacctccttggtttctgtgaacatagcgcgggtcccaacagctaaacggcgacagaggggtatgcgaccttgagacaggcgaggcaagagcaagttgcaggataaggtattaggcggtttaggtatcgtcgagaccaggaccgccaagaatcaagcacagatgaaaatgaatcgaggggtttgatgctgttcgaaaaacaaaacagggtcagtcctttatacttctcgacagataagccacaatccggtgggaaggtgaaagagataccagatatcaatagcagtcgcgatgcgatcgaagagtgataagcagagaactttggagccaggaagctaaaggggggaaaagaaggagagaagtgcgaaacgagagatgatcataagcccaccgactatgttactagtcgcggaaattggaggtcccatatatctccaccggcaaggagagagctcgtaagtgttacaactgtattacagggattctacgccattatgcgtcgtattttgatgatatataggggtttccaaggtttgtttcaggggttgactaactattttatacttccgtggtttacgtgtatggttcttctttcttagcattctgtctatagagagaaataggggttgatacagcatatgtatgtacttggttcacctttgaaacaggaaattggaaattaagaggcttcctttatagaaaaaggcaaactagcccctgacatgggtttcagggcaagggatcaggggactaggggactaggggattttcataccctcacttctacgggactcgaaagatataaggttgaaaacgtctatgctttcagatattagagaaaacattcagatctatagatttttagactaataacttatacacagcacgtcgtacgttgcataacttgcattctggcagattcctccctggcaactggtcacatgacctataccatacagtacagtagcatcgtgaatctcctcaatttcagtctccatttccatttccatcggcatttcaattctacaggggcatttcatctcgtcgcttcgtccatctgtaatccgacgtgttttatctgacccgttgtggtcgccgttgatttttttcccgctcaatttttcgcgcggatagattgaagggtcatgcgtattgcgtttctagcctgtcgcgttcgctatctctaaataccagccgacctagcccccaaagctcacagtgcagcgataccgagcactttccgtgaccaccctgatcgccgatcaccgaccaccgtggcccccatcctcaaagccttttcccccagtggccgaccggacgggcaatgggggatgcctcctctgtcggcatacacttcgtttgaatcccttctgtttttccagtccctagcgacttcggattcccgaccgacaagcttcggctcaatatcaaccttcttgcgaaacaaccagctcgtgcgcgagaatgtcgattttgatgccgatcgcctgaccccggaggcgctagaagacctctacgcgacattaatgcgcgacggatttagtcgtgatagtgcgccctcgctcaatggacgctccgcagatacctccagtccgcctagtccgaagaaacgcaagatctccagtccgcgatcagatggattggctgtcacccacaccacgctcgttccagagctagtggcacacctttacgacaaatacagggatctggtcaccaccgaaattagggacgatgagaaaaagtatacagaaatcagggctgagctggaacggctacagcaggaggacagcaaatcagccgctgcggcagctacagcattcacaccggtgcaaccggtgtctatcgaaggaaaggatgatgttctgaaggaagaggcgccgcgcccaaatgtacaggatcagacaggtcaacctcttgcgacgaccatcccgctcgaccaggagaaggcgaagcccgaaccacaacatatcccaacaaatgtgccctccacgacaaaggagcctccaacaatacaacccgcccctcttataaaccaatctcaagctccccttccccaagcgcaacccccgacacccaaaccgcaagacttagctgggcaagcatctcaaccgcagccgaccaccactgatcccataccaaaaccgtccatccaacctccacttgctccatctacccagaaaccccctccaaccacaccagccggtccgcgagtcacacctgcacacccgtcgcaaatcgctcctcgtgccaatcccgtcccacctgcaccaattgttacgggtaaggctggccctttgacgtcggcgtctcagcgaacccccgctcagccgagtttccagcagtggcagctagatccttctccccactcaccataccccgtcgtctccccaggtgctgctacacctcaagcagcccaggccattaccaagcgacctgtactaccactttccaccaacccgcctttgccagggtcacaagcccagactcccatccaacctcctgttccacaaacacccagtgccgtcccgtctacagctcacacacctgtcccaattggccgtccgcgtgtttcccaaacaccgagcgccacattcccatctttctctgaaacgcgcgcctctcatccacgcttgtcaattgacacacaaggctcctccacaccgtggaagagaactcctcgtccgaggatttcacgctctccaagctcaccgccacggccacggccggaggacgtcagtcccatcagcgaacgaggccaatcacctattgatgcgatggaaatgtcacctccgccgaagattaatctaggccaacgagctcaatctgcagaagataagaaaccacaacgcggccagtctgacatcaaacccgcccccataatcaagaccgagaaactaggtccaattcggaggacgcgcgccgtgagttcgggctcttctcggagtcgtgggcgatccatggcttcgcgcgatgggtctgctgcaccatcggaagagaccatgcgtgaaccacgagcgacgggccgccgaaagggtacagctgttaccgccgatgaagggacccccaaaccgcggacaaaacgtaaacgcggcgcaagtgaagcagtggaacttgagccccaccctgcggatatcccgagattcgacacgactcagtatgtcatggctacgcgcaacttccaccgaacagcggcaccgattatgaacgatgtagctacccacaagctcgcctccatatttgccaagccaattagcgagcgcgacgcccctggctaccatgatctcatctatcggccatctgacctcaagtcaatcaaatctgccattcaccagggcagcaaggctgtcgctactgcaggagaagcagccagcactccagctggggatggagagtctcccgctcctggtggcacaccgtctaaaagcggcgtgctcatgttgcagaagcatgaggatttcataccgcccaagggggttgtgaactctgcacaactggagaaagagttgattcgcatgttcgccaacgcgatcatgttcaaccccattccgcaacgaggattcgggcccgcctttcccatgtctagtgaccgtggttcgcgagagagtactcaagtggccgattccggtgaaggcggtatcattcacgactcgctggagatgtttgaggatgttcagcaggctgttacccgatggcgggccgctgaacgcactgctgatgaattggctaataagaatgtcctctcccttcggcgtggaagtcccagtgaacccaacaccgatagtactgatgatgtgaaagggtaattgatttggaacgccatcttgtattatgaactttgtatttgattaagatcagtttatttgatttgtgaatgaatgccatgatgtctttcgtcggtgccttcgatagcccggcggttattaatactcctgctctacgtgtatattctgagctcgtgataataaaaggaaacatatcaacatgtatatcattgtcataacctttcagcagaggccagccctgctgccctgagtctataatggggtatatatattctattttccaacagccgacctctaagcctgccccggcctcgtccgcccaagcccctcctttgcatagaagtccatcggatacacgcctttattccccgcctcccagtcctggcgcacccccagcgcaacaagcgcctcatacggcgtcagtagcggccgcgtaaacgcatatccccaatcaatactcaaccgcggacaagcaatctgcacccagcactccacatccgccatagatgccagcttcccagggaagatttcactcagcagcaagttaacgattggaatgccgcggtcgcgcaagtgtcgctcgatcatcgccatcgtgtgcgggttaccctgtcgaccaagcgaaccgaggataatgccccacttgcgcgcggtcttggctgtggcgattgcgtcgcggcggatcgtgtgcatctcctcgtgctcgtagctctcgcgcgtcagggtccgcgagtacggatcgtaccggtaggctgggatggaggggttgtggatcatggcggattcgaggtggaagcggccgtcgccgaggtagaggattgcgtcgatttcggtgtcggagagttgtggtgatgtacagccgaggatctcgcctttggagagcggggtgatttgtggaattatgacgcggaaaccggcgcgctctagcacgggtttcaggccgtggagtgtcgcgttaaattggatcgtgcccactgttgcgatcgactggccgggcttgaagttgcgctctagtgttgcgaggaggtgggttgtgtcgatgctgatgtctacgaagatgtagagcgttttgatctgcgttacgtcgacggggatcaggcaactgtgcgcgtagtgtactagcaggtcacagcctagggcgcgggcagtgtagtcgtcgatgcaacaggcgccgtatgtgacgtcgcccatgatgagggtttcgattccagggcagaactgggttaggatgtcggagatggttgtcgcgaagatgaggagtccctctgggaattggagggctactcgcttggcgcctgatgtgcggactcgatggattgtcttggggatctcgaatgagtagttcttggggagaagctcaattgcttcttggatctcgggatcgttcagaatctctggtggcacttggttgagggtgcggggtgtgcgtctgggagcggctggagggagtgggaattagtatgggtagttcagttgagctatagttcggtatatacctgtttgcaccgctgtggactcgacatctttctgactggtcgtatctttctgggcttgggcatctgctgttcgtcgtccgacaaatctcttctttggttgccgcatttggcttgctgcttgtgagccatcctcagtggagggcgaaggaatgcttggctccatggtattcagctgtaatattcgtcaaaagatatcaagaattagaggtttcactgatcttgataacaaatgttggaatcgatatcatcccacttcttttttttctgccgactgactcagcaggaggtggggtgatgtactagtccggaagtggtaaagcgctctccgcattctcggctcccacagttccatgatcccaagctcacccttttacctgccatttctcttacaattctggtttctgtggtcgtacaagttggcctgaacttcgttatgacgataacccgccccaggttgagtcttttctctgccctacgatctccatactctgcacgccgcttctcgaccgagtcgcgcttaacatcggaccatgtccgcatcgtggaggttggcgctcgggatggactgcagaatgagaaaaaaacaatttcaatgcaaacaaagcttgagttaatcgagcgactggctaagacaggtgtcaccaccattgaagctggctcatttgtgcccgcaaaatgggtaccccaggtatgacctcagcggagcatcatcgtgccattccagacgataaaaaccgatttgcttacgttacgacagatggctagcacagctgagatttgtgagcacctccttacaaaaccgcctcaagcacaatctacaattgcatacaattatcttgtccccaacatcagaggactggagaacctggtcaagatcctggatgacacaggagtctccgcggacgcgactggggagacctcaaagtcagcgacgactacagaggtgtctctttttgctgcagcaacggaagctttctctaaagctaacaccaactgctccattaccgagtcactggagcgcatcaagccgattgtcgcattggcaaggagcaagaatatccgggtacgcggatatgtctctgttgcactaggatgcccatatgaaggccccgatgtggatcctgtcaaggtggctgatattaccgccaccctactggagatgggagcggatgaggtctcagtggcggacacaacgggtatgggcaccgctcctcggaccatggagctcatgcaagccctcaaggctgctggcatcgctaacacagacttggcgttgcacttccatgatacctatggacaggctttggtgaacacaatcgtcggcctggagcatggtgtccgcattttcgacagcagtgtggctgggcttggtggttgcccgtattctaagggcgcgacagggaatgtggcgacggaggaccttgtgcacacgattcacagcctgggaatgcataccggggtcagcttagatgagatgtcgaaaatcggaggttggattagtgaggagctgggccgagctaatggcagcagggctggaaaagcgactctcgcccgtctcgcaacagaaaaagcgtcactttgataagttatcctatagtctgtgcttgtcatcgtccggtgtatttattagtttccaatgggtttcacatatttgccaacaccacacgtaaatatgctttgcattgtcagtctagccattttgttatgtacactgtagatgtgatcaaccagaaccaacacccacccctccatctccgttacggagacattatatccctaggcaagaaacaccaacgccaacatgatgcaaatctctggtcaagtcactcagaaatcagtgcagcgaccaccatagctccaatcaccagctgcgccccaccgtagaggctcattcttgggtccgccaatttcgccagtcttcgggttcttctcgccctcaaactcaggctgcagtccctttggcgcatcggggtgaagctcgccacctctgccgtccgcctgaatctcggtctgtggagactggttgacctgaggtgtgctgaatgcgccagtcgaacgtttctggagctgttcaaagatctcctgttcctccttcgggagacgcgggggagccggggagtctgagaagggcatgggcttgtcgtcgccactctggcgcaggaatcgagttgtggagagtggccgaattgcaccgcgggctgcggcagccgagaggactgaacggcgaataacgagagtataaaccatcgtgtttgtatatctgtgtatgcaaggaatgatatatccaatgaggcaagtctggagttgcacgatgcacaaagcacagggagatctcgggagctcggggtttgttgactcactccaccgatgtgactaagattgccgaccccgatatcgccattttttatttctcccggcatgtcgctgatccgatcagacggttctcttacgattctcactctctttggccgtagattagttttggtttctcttctattcttataaatcaaaagtttgccatgtctgccctccgtgtggccgcgcgccgtctgcctcgcgcatccaaattcgtccctgctttcgagtcaccagtacagcgtcgattcgcgactacggccactgcccctcaaaatgtgaaatctcaggtcaaggtatgtgtgataaaaagtatccaggacatcgttcggatttggagctgacaatcgcatagaaggaatcaactctgcccaaccccgacccgtcgccggactcagtcacggcgtccttcattaatgagcgggctcctttcatggtcccgacttatgttcgcccggctcctatgatgatgaagggccagggttgctacttgtgggatatggagaaccgacgttatctggacttgacggcggggattgcagtgaactctcttggtcactgtgacccggagatcgcgaaaattatcgcggagcaggtgcgagatgattttatggactgtatagcgatcaattgcttacaaaaagaccccaattacaggctgaaactcttatccacgcttcgaacctctatcacaacccttggactggtgctctgagtcaattgttgattgaattgactcaaaagtccggtgctatgcgcgatgcctcgcaggtcttcatctccaactccggaaccgaggcgaacgaggccgccatcaagttcgctcgcaagaccggccgcactctggacccttcaggtgaaaagcacgagtttgtgtccttcaacaactcgttccacggccgtacaatgggcgccctctcggccacccccaaccctaagtatcagactccgttcgcacctatgcttcccggatttaagtacggagattataaccagatcgaccagctccagactcttatcactgataagacatgcggtgttatcgttgagcctatccaaggcgagggcggtgtcaacattgctactcctgagttccttgccgctctccgcaagcgctgtgacgagactggcgctgtcttgatcttcgacgagattcagtgcggtctgtcccgtaccggtactttctgggcccacgctcaccccactctcgccccatcctctggcgaggctgctcaccccgatatcctgactaccgccaaggctcttggtaacggtattcctatcggtgccactattgtctctggcaagacagttggtcagcacatcaagaccggtgaccacggcaccaccttcggtggtaacccattggcttgccgcgtcgctcaccacatcgtcgagcgtctggctgacccggagctccagaagtcggtccaggccaagtccgatctctttgtttcgggcttccaggccatacagaagaagttcccaggtgtgatctccgaggtccgcgggcgcggcctgattctgggtgttcagctcaccccagagtacatagctaaggctggtgatattatcaatgctgcccgtgagcgtggcatgttgatcattactgctggtaacggttgcatccgatttgttcccgccctgacgatcaccgaagaccagatccaggctggcctgaatattttcgagcaggctgtggattcggttgtggccaagtcataagtgtcttgtctgaatgccggttaagattttgtttttccttttataccatcttgtattgcgttggatatgacaggacatattttcatcatataaactagagcaataaaggaaaagtgtcgtgtgtccaaggatttatgtggagaggctagccacgtgtaaggcggaaggcggtggatcggttggagataaggagtcgtcgtcactcttcgcgcttgattcgacgtgcctccgtattcattcttgtctgtttctcctgaatattcaattagaatcaatatggactgaatatcttttgtcactttgttgtagctttttctaaacttcccaacgcaacaaccgaatgcctctccctgtgtccgatgaggatgccgcaacgcttccaccccaagagcaatcatctcccttctggaaacgtttgagcgcccgtcttagtggtgccttcagcggtgcagaccctcgagtctgtgttgctttctggctcttcggtgcgcaccctaaaccagcccagttgattagctcaactatgaactaacacccataccggcaggccttatcaacaatgtcctatatgtgatcatcctctccgcagctgtagatttagtcggacccgatgtacctaaaggcgtcgttctcctcgcagacgtgatcccgtcatttgcgaccaaactcgtcgccccatacttcatccacctggtcccatattcgatccgcgtcctcgtcttcgccttcctgtcaactgtgggcatgctggtcgtggctatgagcccaggctataccgatgggggaacgatatcgtccaagattgctggaatcatcctggctagcctttcttgcggtgctggggagctgagctttgtgggtctcacgcacttttatggcccgttcagcctggcggcgtgggggagtggcactggtgccgctgggctggtcggggctggtgcttatgccgttgcaacttcggcgctgggtttctccgttcatgtcacattgttggtttcggcctgcttaccagccatcatgggtttgagcttctttgtcgtgctacccaggtcccccctaagatctgctgaatccgacgctgatagttatcgcgccgttgagggtgggggcccggtggaggaagatgaagtggacgatggcgctggtggagaagacgaggggctcttgggagtgtcgcacaactcccccgcccacaagtccatccatgtcaatcaaggtggttcctggcaggaccagacacgcatgaatctacgtcgtatcaagggactgttcattcccttgtaagtatccgggtctttcgatagtcccaaatctaggctaacaggtatctagcatgatcccgatgctactggtatatatcgccgagtacgtgatcaaccaaggtgtggctccaactctgctatttcctctgcgtgaatcgcccttcgaccacttccgctcgttctaccccacctataatgccatataccaagttggcgtcttcatatcccgctcctcgaccccattcttccgcatccacaagttgtacctgccatcactcctgcaggtggtcaaccttgtgttgctaaccctccatgctatgtttgattttatccccactgtatggcttgtgtttatcattgttttctgggagggccttctcggtggtgtggtatatgtcaatacctttgctgagattgccgaacgtgtgcctaaggaggaccgtgaattctcattaggagctaccactgtcagcgactccggcggtatctgcattgcgggctttctcagtatgggatgggaggtctggttgtgcagttggcaggttagccacgggcgtgattattgccgacgaaagatgtagaatagagtggaggtctgtaatgcacatatatccacagataatttgtcataaaatgatataaaagcacgaaacataggactgaaaccaaccggcctgaatcggtcagctgatgtcgtcactggcatgtgaaagtgggactttgttgacatgtgattcagcttcccccagggcttttctccaatgacgaggttgcattacttggacttcgctgctgattgatggcattatgtctttgttcactgtggctgacttgtctaaaattgtctctttgtcactagtctttggttctgtgactgttattattctttaaactcgagccttgcgttcttattctggcttcacatagactacacatacacatacacactaccggctgaactgggtagactgactagactcagccctaaccttgagaaatgataggtatgcaacatgtatcccactgcaaccaaccagactaatcgatgttcagaccatgttttggggaggccttcgacccgcttccgcaagatccaagtatttgcagtggtttccttctggtcggtttacttattaaggtacagcatataaagtcaacatctgtctaataaatcccaaatgctgaacgtcgaacagagcagatagacatggcccgccgtttattcgatcgctctcagcccgcctcacaggaaagttgacagcatggcagacaacagtgatcatattcctctggctctacctcagccggaacttcgccaagattgtcgggctagaatgtcctgaaccattggcaaacatgtactcgcggtccttcttccgagcaacatggataaccactggtttggatgctgggttttggaccgcgatgaacataaagtcaaaatggctccgagatatagcctcactagtattcacagcctactacctaatcgctgctgaacaagccgatgagaaggttcgccgggtccgtgctaccctgacattggagcacctgcgcgtgtcttggaataaacccaccaccccttacctgtggtcattggcaaaactgctacggccgcgaatgactcagttcccggctcgggcaattcgaattcctcgcccggcacagtctgtgtacaccgacccagtgaatgcatggctttatttcgatggtccgttgagtgcgctccgagatcagagtctcattgtgctggatgtacctggtggtgggtttgtggctatgagtcccagaaactcagaggacaagctattgtcttgggcgggacggctcaaggttcccgttctgagtatcgattataagaaggcaccggaattcgcatacccgtatgcgctgcatgaatgctacgatgtctaccatagcatcattgccacgaacggtcgttgtgtgggtctgagtggtagggctcgtcctaggatccttgtcactggcgagagcgccggtggcaacctggcagtgggcatgaccttgatggtgttgcagtctgcgatggctcagggctggcgtggggatgatgtgcttccggccccggatggtgtggttttgggataccctgcgttgaatatgaaggttgagagctggatgagcgatgagcagatgtcattgatccaggagaagagcacccgtcagacaaaccgcggtgttctgcaacggaaacaggatgaataccgtaaactcacaccattcacatcgccaggtcgttcggtcgaagatctaactgctatctcaccaccggagaaggcaaaggataacaaagaagccaatgtggccactgaagcggccagagcactggaaaagaaactccaaaagagcgaggacctagccccgaagcctgccgttaaagcagaagatgaagtcaaaccaataaagaccagactagccgtctcgtccatgattacctatgttcacgaccgcattctcacacctgagatgacacgtgcgatgatcattctctatattggaccccaccatcgccctgacttcaacaccgatttcctcctgtctcccgtcctggctccagatgctttacttgcccgcttcccgaaaacatatatcatgaccggagagcgagatcctctagtcgatgacacggtgatatttgcaggcagactgcgtcaagcaaagctgcatcacttccgtgagcgccaggacctagggttggagagggccaatcgccccttcaacgagcgaaactacgtcgagatctccctgatccccggtatttcacacggcttcatgcagatggctggcttcttccccgacgcgtggaagtatatccatcgcagtgcggactggctagaaagcctgttccaaattatcaagactaacaacttcgaggcggatttacttgatcctgaccgggatgcgagtattttgaatgccagtacttccctcaaatcaaacgccccaaaaagcggacgtaaccaccgtcgcaagttcactggcgagtcttcgggtgatgacgacagaccattagagatgagcatgagcaagaccacgcttgctagtggcgaggatgcatttgcatcaaagcctgaacaccgcactcgtcggaggagatcacgttcctctttcgcttcctcgcggattacagggtttacatcgctaggagatgaccgcaacgccaaggaggatttcatcgctaagctccgatgcttggaaagagcgggtcgttctgaccctttcgatccggacgagacaaatagtgcacctgaaagtccgagtatagttcgtccgagaagacggagcatcgcttcccttgatagtgaagaggatttgctggatcgtcgcatgaacgggctcgctggtgggttgatggggatcggggaaggggcacagactcccgggctgtgagaggacagggctacgatttatgattaatatctgcgtttattttcggtttagagtgggatcaagtatgtgttggaaatatataccttctacctgaatcggaagatgtatatgtagaacttcctcagattgtgtcaccgcatatgaaggaatcagatttgtttaaactagagcaattagggtgttcattcgagggtctcacttgtgtgagtagtttcttagggcatgattccctatttccataacagcccctctcggtggaaaggtgagatggttacatatcatgatctcgacaagaaactgctgcgatatggggaatgtaagaaatccttttaattcaggagggtcaaagacgcaaattgattttccccaggggcccattttctttcaagaaggcagctcgatcttccagaaacgctttgtatggcggttttaggacagtcttctcttcatcctcccatacttgatatccgacttcgtcccacacttttgactactcttgcagcagctgttcctcggcccaagctttttaagagaggtcagtgttcttcacgctgaacagtgaacagtttcactgacagaagtagtatgaggaattttggacgaatgcatccaacgtgccaatcatgtggattggtcttccgttcagcatgatctaccttgcttatataactactgatacattcgatgccgaagtggaacatctatcgcttcagatcgacccttctcgacagaagatcgtccagtgcctagtgctaggcgagtacactagagcaggaccgtacgtcttgcagacagtcattaactacgtctatgtcgagttttgtcttcgaaccgacgtggatcaagatacctggtatctgctggccttggaggtaaacctggccatgcggatgggctaccatcgcgatcccagtcatttcccaggtatttacccctttcagggagaatgcgtcgccgactgtgggcgacagtgctaatgggtgatatacttgtgtcaaaccaaatgggtatgccacacatgatctccgactggaaatgtgacacaatggaaccgcgaaatttgaatgacacggactttgacgaacagtccaccgatcttcctccgtcacgtcccttgaccaaatacacgaattccataggacttatcgcacgacgacgtatccttgcagcactggggatagtggccgatctcacagatgcagttaaaccatgtagttatgcagaggtgatgcgcgtcgacggcgtactccaagatgcggcagccagtattcctcccctcttgcagatgaagtccatggccactagtgtgacagattctctgcaggtcatcatttcgcgtttgttcttgggtcatatgatctacaaggggcagattgtgcttcaccgccggtttctatatacaagtccggacgatgcggattatgattcgatgagctactcgcggaaagcctgcttggccgcttcgctgggtatgctgaatatctaacatgtgcttgatgaggaaacatgtccaggtggtcagctctataccatgagatttcgagtggcttccattatgaaccaccagttcctcactgctactatggtactatgttcaattcttcatcgtgggaagacgatacagcgggaacaagatatacgggcggcccttcatctttctaggttcatttggatgcgaaagagttccacttccaaagagacaaagaaagcggccgagactgttagttttgtgctcgctacggccggcgacggtcgtaaacctgacctcgcttttaaccaagatatttcccacggtgtacaagacaatgatcaaacgaacgctttccagggaagttgtgccaaaggcacaggccaaaattcagacgaggaactactatttccagacaacatgagtttatttgagcgtaagtctcagataccaaacctcctctcttgaccgatctgaccaaagctgtagccgaccattttgttatgactagctcccttgggatgttcacgtcgcccgcccagcaaaatcaacactttggggttaattccaacggaatagagagcccatttgaggagtggatggtgatgaatctgcctcagccgtgatggccatagccgagactacattttggatccgacaactgacttacgagttttttcataatagaattatatagagactttggaatgaagatttcaataccgtgcggctttgaattacttttgagatatcatattaattcatttttacacactttttgaaccctttctgggatagttagtcgctacctatagaatgggataaaaagaaacaacggcttttgatataaaatacttgcgtagaagtgattcctcaactggctttacactatgaagccagataggctttcagcttacaggaaatacacatgagatgactcaatggcggaactacagcatcacttcggagattgtttactatgtctatatatgtacctgtatgtaccggattttaggccacggtcgcgaatttcccgattggggtgccgccgcttttatgagggcgctcaggctcctgctcactgagtatttcacagcacaggtgatcactgtgagcacttagggtatgcttagtaatgtaaaaaaatactgtttagtacttctcaaatatcgctcagtgagtgctcagtgagtgctcagggtatgctcagtgagcactcgggtttgctcagtcagcgcacagacatgctcatcttgatggcctgaaaataaaggcataaaatgatcagatgaaatcacgtgataggtggatcattcatcagccatctattctgtgcaggctagcgcccagcaattaaaaatctttaagcattgaccgtcctttttgttgattgcgtcctgcattagggaatgtattcatcaatatgaccaccgtaaaatgatgacgtatgaagatccatagctaattcaggtaccctatcctgactatggctaggatgactttcacgaggtatctagcatctagtcgggctataaatacagcgaaacccccccccaaagacaatcgattattagaactcactatttcctttcatccccttcattctccttccagcgtttccagcgtccctatccaatcatagattatgggcatgaagcggcagacttgcgatttagcaaaggaacggcgtcgcgcgagacgcaaagaaactgggttccaaccggacgcctaccgagaggatgatgccatacgtggtaaacataaacatactgacgagtccaaagcccttcatctgcagtacatcgagctctggatcgagtgagtagcctcgcaatgcttttccctcatttacttgtttattgacttttcaggtttttgattgaaagcggaagagtaactgatggttatgagctagaaaagggaattccggcgcccaaaattactgaaatcaaagaatttattcggtagtatgcgtattctactaaaaggcgtctcgacctagatagaaggcctatagtgaccactactttagcttacgccgagagacttttcggtagctttgagacagctataggaaatacagttactaaataggatcgctcagagacgtacagagttagtatagtccgttttgcgaaggctttaagtattaaggctgaccctatcacagtggatcagcggaactctaaccaaacaaaaagtcattataaaaaaggaaaaagaaaagttcaatttcataaagacggactatacctataccgtatcttcaatctagatggtcgataatcctatcttcatctatagaacaatgaaagtatttcttctattcgctctacagctttatatttttaccagtataagggttagagcattcattccgagaaataagcactagcaagagaggggtcttcgctataaggtatatccaaccctatctatatattctatctagctattaatacttaatagtacatagacctcgtcttatttcgttctacttcttctaacgaaccataggatattaggtagcgagtcaatgaatagtggctcaaaaaaatagaaacctagagtatactatataagttaataacctcattccctaaatatactactttatccttttattccacaaacgctaactcgccctatagctttagcataggtatctgtgatcatagcagaccttaattcgcattaggactgcttcttactagcattagcattaactaaggcatactttacagaatcaatacccttagagatttagcccaaatacggttactcgaagggaaggataaaatcaccctacgctggaggcatgatacgttagagaagcctatattccggaacgtgactgtacaggggatacaggatttgacgttaacaatagaaagattctgttactttcttcgccaaaacttcaggaaagcgaattatttcaaagttccgaaaattcatgatatctatcgagcgcttaggaataaagtcgatagtaaggccttctaattacctacaattcttaggataaaatctcacatttaataagtcgatacggcttagcattagtctcacaactatatagctataaagacggaaaaacctatgaaacgagctgtatagcccactgttcgtccattaatactatagcttatgtccttaacgaggagaaagacgatcgctattataagtaattctgtaaacctgatttacctggctacctagctgctaggattaaagaatctatcttagaaagtgataagcttactaaaataagaagccgtattggctcggcagatataactggtaacaaagacctagaaaagtacaagagactataatataggaaaacctatactcgcctccgcctttcagctcctacaaattaccggacctaatatgttcgtaacaggcaagattagagggttttatcaggagggcaaaaatcacctaacgagccagaaaggaatgcttgtacacgtgcccttgcgctcattatacccaaaattggtcgcctagcagcagtcatatcgcctatagacccgatgtcatttaataagaaactcctcttcataaaggacttgcagaagcagtattcgtgggactacaacgtaatatacttaccaaatgaaacacctgtcaatggaaaatgccctattgcaagctgccaaggagatgttcactcgtgagtaaagaatgtcatatgggatgattaatactgacttgcccagactggcgaactccagctgaagtagatatattcatgaatgcatccgcggctatgaagcttctcagtttagagttagcaagttggacataaagttctactacaaatgtatgcagtggtttcatacaaagcaccaatggcgagaacactgcaagcatcacctacgttgatctgtattaattgaaccatggacgaggctgttgattttgtagagagagtatctgagtactgaccaataatcatgaactgatttttagttgattgatctccgctgtttcaccaccattttactatgattggcccgatttttttgacagccgagcttatttgaacctcactgagttttttttcggtctcaatcttgaaagtgtatgagagatcagagaaaacatcagatttatttcattttcggttctatggatttttgtttttgcttttcttggttcgcgttccttcttttcccagaatcttggcggcctaagtagttgtttcctggagtgcggtggcggcgaggtgccgccgactaagagggcaacggtacttatttttctatgtgaaagctataccacattacgccatttccatcaactacctctggtagagaactcagcatcattcttcagaaatatccaattattagtttagtgagcaacatttctgtggatcgttatacgtctgaagagaacctgtggctattcggtcggattctctgctgtcacacccgttcaacgaagccaggtcaccacggaacctttacccgcgcatcgaaagttcattatgtcgaccagcaatgacggcatgcagacaaatatcctggttccggatgatgcggtaaccctacaaaactcggggctggtcagctctccttcgtccgatggaacacgtcgtattcataaacgacgtttaaaccgatctagcgatgaagaagaacagcatcttccgctgacccccgtatcgatctcctcaagctccgattcctttgtcagtatcccggatcatctcgtctctttggccgcactcgagcatctcggctataactcggaaactgcaactcttatctgggagtattggactaactggccacctggggagcctaagagggagactgatgacactgataatggtgtcctgtttattgacgtcgccgaaggtcaccttgattattctcccgatacctgctcagagaatgatgccgaatggttccactgtatgaatctatatgggatcactcgcgagcttcaggaggcaatcatggatcccaagttccgatcgatccgcctaaccgactcatgcaagtcctggattcgggacacctttcagttacgcaaccgagccctccaggcggtacaagaagcttcccgtgagcgagatatggctagtcgacgggaagcttcccgacctggacaaagtagttctggacggcgatcaatttcagattctttgagaatggttccttggctatcgcatgaaaccgctttatcggaagctgcaacaactgcagcttcaagagcaccgggccatacaaccatctacaagggaattgatcaagctcttatcacggaattattcgaccataatggcaacctagacttcggatgccttatctcccgatcacgttgtgatttctccggaagacaggacgatctctacttcgctattgaccgagaagtggccgaactgtatgcttgctatatcaagcaccgcagtacgtgcagcggggttgtcattattcatatcagtatcccgaactcggtcattgagtccctctctatacccgatatccaatttaactattggcccaacgcagaatggaagtcacttatctttcattgtcgacaggggaaaaagctcccctctaagctccggaagtacaaacttgctaagcttataattggaaccatttgtggcaagccaaaccttgttattagcaggatgcgatctccagatgaaatcacggagcacatggttctgaagactagcgatggacgcaacgcagtccagtacgtgttcaaaggggacgatggagatactttgttagaggagtgcagcagcgtaactgtgttccctttaacatcacgacagtttcaggcctggcttgagcgcgtctgagttactttggcggaataccaatacttgttccccaccacgaaatggcttatgtatttgttggactatcaattatcgagttgatttctaagcattttttactgttaatgtacctagtagtgtaagcctaggttaccggtctagccaatagttatctagcttaggtcgacgctagataggcctggtagaactagccttttgggtattctgagattagtagaaaagtttctaactgggaatacctataatatagggaccaagatagactacccttctggtccaagttggaggattcctaagggtaattctattcaccgcctcatttgctagccagagaagacgagtgatggactgatatgtgagtaacccgcataaagcaatgtaagggtataatgaatattatgacaacgccaatcacgctccatgttctatgaatacttttaccgggatgagtttataatgatgcacatgcttgattaatgcttctgatgtcttcattctcggggatgtacaaagtaacgttgctagttgacagaccgaaatctgtcggggccaatgcccacgacgatgatactaccaacctccttccgtccagcagaaagactaaaatacttttttttttctttcttccttcaatagccatcgtgaacttcctcacgtgccaacccatatcagatggttctgcttgtttccccaactcccgattaaagcaaaaagcaaagggtatccgcaggtccacattcccttccctgttacctcacaacgaggcactcctatcttcataagttagtttcaatgctttaatgaaaatgtactttgtagcttatgtaataatcatgtgatgctcagtgagcgggtttaacgattacgtaatactcaggggcgtgctcagctttactcagtgagcaaaaggcggcaagggggtgagcactaaaacggaaagggaaatccatctcgctcggcctaaaatccggtgtatatgtctctcgaaggcggaacatgtccctccgctctcgttaagtttggcagaataccagaaatccaaccctccaatcatcagcccctatcaggctccatggtggagaatgactgtagccaatcaaataacaagacgaagtatataggaacaacaaggacaggatgtatgtacatggccatgaccttatctgatccctagcacgtagaagggaaagaacgacacgccgccttccaccgtcgcgtcagacgtgctttgtttacttttcatcgtcccactgtctcctggtcttctctatctccatcccactcttttcgcttcagccgactttgaatcctgatcttttcccattgttttattctcaatcattaccacttcactctgcctacactcgggttgggttagcagctgcaactccaccgcccttttcagtctccgtatcaactacatttggccgattcttgacgcgcaacatggcagctggagtctgctactggagtggcaacggctcttattgctgcccttgtcttggccaaggacagtatgatgtgaatgacttatcgatatcttgccgggagtgtggacatccacttaagaatcatttccaaattgggcgtaagggatttcttctctctgccaaactgattctaattctctttaagcgcacccaagtgatgctagtgctagccaagttttgctaccgagacaccaaaccgtgaggaagcttgccaatcgcatcaatgaacaaagagtggtgcttgcccgtggaacgccctcgtcgggaaagacctttctcgcccggtctcttcatatttaccttcgtggacagggagtcaagtcgatttggatcgaacagtttccccctagtttagagggtggtcctaccgcgttgcattacctggtcgaggcctgtcacacccaaggctatgctgcattcggccacaacgttctgctcgacacgtttgtgtttatcattgatgatgcgcatatgacttacaataactctgagctgtgggtacttctgaattcagtgaaccagaaccgtctcgcgaacataccaggggccagtttctgtttgttcggtgcatttggcacccccgataggggtgttatgccacagaacatggggagtgacttgatagtattcaatgagcgtcagcgtcttttcttgtccactaggttttccgaggacctcacacttttctacacccgagaagaattcgatctctacctggaaatgcatttccaggctcgaggttctgattacgaaatttgtgagatcttgaaagataccatctttggcttaaccgacggccagcctgaattgatggatgcattcatgcatatctgtgacatggtatgtgatggtcagtaatgtctgatattttctgtcatgctaacatcttgccagtggtatgaggttctctacaaggatgacgcggatgacgaaatggaaaccataagctatgatgactatgaaatcatgcaattctttcaaattcgcggcatcatggaagcaacgatcgcggcaattgtcaacttcgcgggtcttccactttctcccgaaacctttttccctcccgaagcagagtttgaagttcttcgccaggttcggcaaagcggtgattacagcatttcgttcaacccacaaagtgaagctatgctgtcgtgtatcacgaaaggttggctgcacatagaacagagccgacaaggaggattcagatgttacttcccaacctactttcacaacaagtacgagacatgttattttcccaagcctggtatgcgtactaatattagaacagggtcgtggaatacctcatgggagtccaggatcttagatatcccaccccgcctactttggacagagcggaacttgagttgatgttgagcatgcgcaccatgacgatttcgtaaaggaagttggctcatgcaaatgccgagaacagcgttcgccagacgtggaactcacgctagatattcggtgatatcatctttctgagggggttgctaaatttgtgtctgtggatgatgagcgtgagttcgaggaatcctcttatgctgcatcgtcggtttgtgtccttttttaccatgttatcatgcgtaaaacgtaagtataatttgtggaaatactgcagcaattcaagttgattttaatttgggtatccctgtaactatcccctatgttgtaagatgtagaaattgagttatggcgactattgtagggcggtggacaaggcggtatgtagtatgtaaacggcggacctgtgaattactgtatcgggttagttttgccgttttgggtttagcgccccaatacgctgtcacgtaacctcccttcaatgccgctgacataaaagacccgtcttcgctgctcctcctccctttctctcacttttccattattctgcctctctatcttgcacttatcgccgccccctttcttttactccggcccctaccgactactgtacatttgctttcagcccgacgtactgcccctttcatttctaccggagatgccgcttaatccgacatccagcttgcaatgcctattacccagaagtgtaactactgggataatacagcatcctgttaattcgtgttaataatcctactccttccctagggcagtgactaagtaccatactacaaagatatctaggttaccctctgccagtacgccttttcgtctctgattccgcgggcctctaaatctgcaaagtgccagtataccctcgacgctgcatatccctctcccgccgccctacctgaggttgcattgcacagcccggctttatagaatagctcccagttgcctggctaaacgcccagttatcgttatcgtcggtctctccggtccctctctacctagtcggtgaaaacttgaaatcacagctcggtcatatgggccaatagcgaaaatgccgtacacgccctagaccttggtcgatactgtatcttgtgatcaatgcgagactgtaactgcgggaattgttgttataggctgtgaaactggtatagtctagcgtcctcgactgcaatgggttagatagtaggatctggttgagattatctactcctggtagaagaaggattctatcttccgggcctccgtcgtcattatctataaaagagactacaattccataaatatggtaaaactagaattcgaatcacctttaaatactcctcttcgcctgttcctattctctgccagtttttttttttgttttatgagtgcccatagtcactatatcctaaagagtctttagccgtctcttcacaatatatattaagtgtgagttttccctcgtgctttttttttcagccacggaattgcgtatattgcctcacctgactggacgctgatcctcacgctaagcagccctttagagacgattcctttgctatggccctcttctggcgaggtgtagcaaggcagaacgtggactttcgaatatgaaacgctttgatctaatgggagaaatgccgtatataccgtcggccttgcgcgtgactccttagtgatttccgttgtggatgggttggtggatcttcgtatcggcaggctgcgctttgtctcatgactcttgtcaatccaacctgctcaaaacgctcagaggaggcaggggacggtaggcaggtataaagggtcgttggaactcctcaaaccgagaaagaggctgactatctgtttatggttccttctcttctattctgatgtagggtctactatatatactgctgcagcgacaatcggatgttccaatcgttgttatgattttttggcccaatggctaaatcctcttatataattataacaaacgagatttccatacacacacacacacacacacaattcattaacgcccggcggctgagccgaaagggcaactatcgctaaactactatacatgtcatagtatatacaattctgtgactcattggagcccatacacaagaccttggcgtatttgtcattctcagcatgcagtgtcgcagcggatgctcgtgggttagtaagttggttagtagactggcttgaaggcgcttctccaagtgttcaacatcctatcttcggcagttgaagcgcgtccaccgtgaatagcacgaggtggttggtgggttagattagaatgaaagaggggtgatttatgttcgtcggcggggttaagtggcctcgaggcggcctgtggctatggcgaatcgtattgaggcccgtactgcctctaagtttggcgtccacttttgatcgtcggaaggcgacttccctcccaggtaaaagggcagatttcctcggtgagtgtcggtacattgtagcatatccgtccggtgtgtggtccacttccgacatcgaaagaggaagtgctccacagtttccttagcttgtccgcacgcacactgatccgtgtcggccgcgttgattcgatagaggtatccattcagtctcgccatgcccgtccggagttgggctagcacggtcgcttccttccatgacaagggatcatacagctgtcgcgtgtgttttcctgggagtgctgcatctactcgtttggcgtgctttccgacgtccgctggcagggtatttctggggactgcttgagaccgtgcgagattcagcgtggttgattttatcctcggggcgcgttcttgcaagagggcatcttcttgtgtcgcggctctagcctgttctttagccagacctagcagcttgttgtcttcactggcagaaacccagcggacttgaacatggtttccgtttctctgcaaccttttaatcaacttgtatatccgacacacgaactcctggccagattgttgtcgagggttcctgagtgtgagaaccgccgctttgttgcttgtgagcagtgcgatcgtgtagtctttcagtcccgtcgccgtgctcaatacatgtgccatggctgccagttccgcagagaatggattctgctctgcccttacagccaaggtgatggatagcgctttgtgtttaagcttccgattccgaggtggtcgcttctcgatggccactccaaaacccaccagctcgtttcgtgcagagctgctaaccgcgacctgcatgcacccgcccgcttcggccagggactcatgctgctcatcaatgtcggtttgtacgcgttccgcccacggggatagcgtgaaggggttgatcgtttctaatgtctccatgtcgatgtgcttgagcgtatcggctacgtgatacagtggtgagcggtggtatcttctgaactttctgatctgatctgtacaccggcgaagaggattggtttccggcaaggtgtggatgtctgtccacattttcacggctcgtttccaaaatcgacgttgtgcagtagccatgtgagcctccgcctctgcgacactagtcgcgactgtgagaaatgtccccacaatggcttgcgcgcctactctttggactcggttgatcggccccatggctttatccttgcacgcgtgcatccagacattggaggcgtagtccactactggtgctactgtcgatgcgaatagctgtcgcgcggttgctggggagaggcctcggagtcgccgaagctccatcgctgcttcgagacccttggacgctgctctcgcgatatgctccttgtacttaagtctcgtgtccatcaagacacccaggatcttaacgtggtctttgggtaccaccgtctgccccttgatggtgaatggctcatggtccaatttacgcatcttgggagcaaagtgtatgatagccgtcttgtcagcctcaaatgtcgctccgcttctcttttcccagttgagtgcctcgttgatgatggcttcaattccttcccggttactctgcgcagtcggaccggtcacccacgcggtaaaatcatccacgaaagcgactgctcctccctggctgtcgatctgtctttgcacgaggtctgcattgaaaaacagaaatagaatcggagacaggggcgagccctgcggcagcccagcttgtggcaagctttgagtctcagataactgcccgttgatcaggatatttgccgttcgttccgagcagaaggccccaacccaacgaagcaagacctccggtatgcctcgggctttcatcctctggatcagtcgttctttgcatactccgttgtaggctcccttgacatcgaagctaatcaagctcagcactcgtcggccgcgccacgccgcatagatctgctcctgcaggaacaccagtgcttgctctgcggaccgctgctttcgagccccaaagtggctcccccggcggcagtccatgcgtctccaccgcgtgcgagatcctctctgcgatcaccgattcgagtatctttccgagtgtcgcaaggagtgagataggtctccatgcctttgcaatggtgtagtcatctttattcggcttcttgagcggtatgatcttggcctgtctccactgtcttggcagtgtgccctcttgcagcgaggcttgaaagaggtcgaggaccctgtgcttgactgagggccacgtcatcttccaaacgatcgccggtaggccgtcttcaccaggtgccttccacgacttggccgctgacagttgccgctctatctcctccatagtgacggctggcatgtccacaggcgctctttgtggtctcactccttcctcgtcgatgttctctggcaaaggcgggaaaaacttggatatcaattcctccgcttgctccttgtgatcgttcgtagtggttccatcggctctgaggagctgcggaatcttcccgaacgcggcattgtctcccgacttgaggtacttggcggctttccagatgttgtcgttgtctgcgagaaactcgttccagtgcttcttcttttgtttgcgaatggcatcgtggtattgtttggccgcatcctgggccatcgtttcgagccgggggacttttcgccccgcccgtcgctcggagcgagcacggtttctccagtgcgtatatatatgacggagttgagtgaggtcagctgtccaccatcgcttcgcatgtggtgatggtttcgccctcggggttaaagcgtgtaccgcttcggacactgccaacatgagtcgatccgttttctgctgtaccgtgccctccgacggaaggatggctagagcgttctgaatcctggcgttaatctccttccatggtgcattcttcagtaaaagtcgctcttggtgctttgggcccgaccactgggcgtcgaacacggactcaatggcgcagtgatcagagccgtggtctgtctcgagtaaagcacattttgtcatggagtccgtcagattttctgaagctaggacgagatcgatggtagactcgcagtctccactttgtccgccgccgtgccatgtcttggtgccgcgtttaagcaagctactgagcgcaaactcattcataaggtcaatgatcggatccgcttccccttgtcttcccagcgacacctcgtctccaccccagagttgatcgtgtcggttgaagtcccctaccatcagaatctccaccacggcgcctgtctctcgtcgtacttttgtgatcgcatcgtgtaaatgattgcacgcatcgtccaaggctgagatattgcctccttcaacgtaaaccgatgccataaagatcagtcgctcggggagcctgaccatcgctgctgtgatgtctggagactccacagggacttgctccgcttcgacttctttgttgacccagagcatgctccgaatcgcccatctcccctccctccaggtagagggcaccatctttgtccacttgtgatgccccattggagtggtcaagagccggccttgaatcctcctcgcttggggttcctggatcgctagcgccaccgcgttttgagtgtcttcgtcattcattaaactctcgtgcactgcaccctgcttcctcacgttcagctgaattattcgaagagaattattcatgacgtgatggatagagcttccggcagttcttgctgtacgattcgtgaggccctccgcacggtacacactttggaaccggttggatacagtcgctgtggcgatggccctctgtagcgcatttcgcgcatttctgggcgttcttgcactggaatgccttatggcctatctcttggcagttgtaacattgtgtcggtcgcggtcggtgttcgaagacactagtcacaccagattctccccccgcgtggaaaaatccgtcggccaagagccttcgcgcgtcgatgcgtttggtcaggtaaaccaccattgaaccgtaggccttctcgctctcttttctgctcagccatgaaatcttggctacgttggtctcattctcctcactaaacgctgctgcagcctcggttcggacctcaccgctctcgtctagcacggaggtcttgttgacgctatcgactttgatcgggtagagctcgtcacggaggacccgagctcccgccccgattttctgttctgcaacctttttgaccagctgctgttcatcctcatcccggcaggcgatcctgatccggttggcgtttttcgggtcaacggtaacagcgcgacagcgccagtgcgcgtggccctctgttaactgtatctctgcctcaaccgctgctctgaccgagcctgcggaggtcgattttgtccctttttctgccatcttcgaggtatctatcgtgcaaaatagcgtgtccgtaaaggtggtgggtgtcgtgttcagcgttaaaagggaccgtatgttgcttgggtaactggacggcggagtgcgcgcgacatctgcgtaggaaggagagcctgcaacagcgggaacactgatttcctcgcgtaaggactggatttcgcgcaggatcgcatcgtggttgttctgagagcacgtctcagagtggcattgcggtgtcgtgtttctattcgtcagggactgtagctcgtgtcggacctccgcgagggcggtaccgaactgttctctggttctctgaatttcttccttgtgtatttcgtcacggagtctgatctctcgcctgagtttggcgatctctctcaccaaaccgccgacgtcgagctcttcgcgctcggtcgcggcgtcgtccgaagttacctcgtcacgccggtctcctagctcaattctctccttttgctgggaacgcgtctttcgtcgatcagtgtcaatttcctgctcacgagcgtagttgttcggtggtcgagtggtgcgtttcggtctcgccagtcgcggtggcgaatcttcgcgttcgtcacagtcgggcggttcaggggttcgcatcgcggcccgtcccgccattggtcacagtaactcactagacgcgctcgaaatcctgatgaaagtaccgagagacaagctacagtacttcccgaaactctttatactgtacgagctatacagtacgtctccgatttccatacagacgcgctcgaaatcagtttcatctctacactctctttaattctttactgaactttgttttgcataacgctatgcctaatatagctagattccccctgacccacacttttggcagtatcttagtacggtaatatataatggcataaaaatagctatcgtatcatggttgtatgggctatgcgtgtctagagccattcacttgcaaacaagccaaacagccgaggtggcaggagattcggtcggttatctggccacttctcacctccccctttagctaaccacgttcaatcgactattctacaaatatagtggacgagcgaagacatacgtagatacaatactggtaggacgaaatattttttaccaaccgacttacctgccctacaaatgctggattcctttagtccccttctgttgaacactggatgaccactatgtgctgaagttcggtttattaggaaattgaggacgatgattaaccacttctatcccaacggtgatgaatcccaaccccaggacctcgatccgtcggaccaggactcgcaatacgccccaactcctgggtattacgaacacacgccaccatcagaatatggatttagcccttcaccgaaccgttgcccccaggacggttccgagcccttactttcaattccaccagaaaccaataagctgcttcagctctccgagtgggaagcgaataggccagacgacgagcttcccgcaagctttattcggtatactatcgagtggaaagtcaaagtgaataatcggtccatatcagaggatacggagcaggacgtagcgttgaccccaagtgcttactggcccttggccctcagggacaagctgtataaggtaatcgaggagaaagttgcgcgtaaacgaagggtcaggtccgacgacacatccattgttgtgtcgatcaacgatcgcaagcaacacgacctgaaaaagcggtttaatggcctcaatattgactggtccgccgtggaaaaacaattactcgtttgggggaaattttataccagcggtaaagagttgcggctgaggataatcttcaactatatagaggacgaccactcccctagaagcgtaacaggcagaaccgacaaaagaggaaggtcatctgttaccaaaaggatgcttaacgagcgagatgaataactcgacgccgaatagcatacaactggggaacaatcgatctggcgggctgtctacaacttgatgcgttgcccttcgccgtcttgtcatcttggtccgcactgctggcaggacccacatgggaaaaaacactattaactaaggacacatcatttgaaacgcctgatcgcttatatcgaaggcggtggcattctggagtgtcaagatgatgtccctgacgctgttcacgaagaactcttcttagaagaacaacagaaattggaaagtctacaatctaagggcaacaaaattctcgcgccaggaaattgcccgcctatcaatatcaacttcatgggagggcaacctcacctacaatcgccggcgaccaactcaattccagcattagccacacctccaccgcaaaatggacagatagtagatcagctcataattgacgggccccgagatatggctgtaagggaatacaccgcgtggcaagaaacaaatgttgttgacgacaatttgaaggctcaatttcgacaggcatgcgatgtaacgctggccaacggtctggatcttgaacagatccatgaggaccataaccctgggttttttattgaaaaaggagttgcggtagggattgcacgccgcttcataagcgacatcgatagatgggtgaggcacgtaagaaactgattgcgcaggttcgcagtcagagtggctggcaaggcgtgattagacttggatttactcatttatttgctttcgattagatgtacttcctacaatgtagtcctaggcaagatcaatacgtaatgcatggattatctagtcaaacttgccaacgaaattgtcttatacagaactagtgttgatcttgtcagacaaaaatgggggcaccccgtttcatagatacgggtaacctgatatacgaggtgcagactattcaggtgctctaacagatctataatcagccccgacgctcaatgatagtcttcaacaacaacgccagcatggcgaaagtgacccattgcacttcgttctcgagatccgacaacctcgacacaccactcgaggaaagatacgaatccttagtcaggtctttgttcatatcgccgccaattacgcctaataaacgccttcaattcagagaaaaactcctcgataggattcaaatcgggtaaataaggtggcaggtaaaccaattttactcctacagtagcacatatttctttgattcgctcagaataatgaaaagatgcattatccatgactaaaacggactttggttcaggccactttccgcaatgtctgagaagctgctcaataaagtcctcaaaaacagatgcatcagtcgagccttagaatacccgagaaaaaacaacaccatcttgggcgtatacaggaaggatctgatatcgctggtcacgatggaatttggatacctgcaaaggggtcgcacctaccggagaccaaccggtccatctaaaactaattcgtttatcgcatccggactcatccatatagactaagtgataggattggaaatcagataggttgtgtaggtagaagtctcgcagatcggcgttttgctcctttgctctttgtcgagccacctttttcgaccagccgacagatgcaagagcccgcttgagactcgaatttgtcacctgaatatggaattcatcccataaaaagagcgccatctcgtccacgtacagcccaggcttctcaagaaggtgatcacaaacggcctctagcatcggaggggtgatacttcgtcatcgtccgacacgagttagaggcgctctgacatttccgaattggtgaagattattgcggatattgatgattgaacgctcactacactcagctgcttcggccatttgtgatatattcagggatttgctaagtatcatgtcatagatcatctcgagcttcgatggtaggagccttggcgccattttgcggagggacgatagaaggtgttgtgggtggaagccctataaggcattgactgatgggcaatgttgggcaccatgtggaattctccatgctcacccttgctcacccttctgctcagtaagcagatgaaatgacttttggtcggacgtctgggggatggtggggtattgggaaatgcacgtgaccctaagtctcgtagttcccaggagcatggttgtttctagaagaacgatttaaaaactgagggccctcaattattacaagctaggggcaaagtgacaataccttagaagtcattgatgctagatcgtgcgcttagtttctcctagctgattgactacaggatggatggatggatggatggatgatttcatttacccccgacccctcgcagagcgatacgcaggctacagcaactatatatatccgtatatgtacatgtatcgtgtcccacttcctgaaaacgaacttagagcctatcgtggcctagttgccgctcctgttgttaggctgccctcatggcgcgcgactttggaaccgttgtgacgcctctgcgaagtctagcacaaccgtgaccgtcctagcccgagagacggtgtctggcttacctctctcacaccatttgagcctcccggcagactcgacacgctgttaaatgcgtccccaccttctctcttaattctcttcttgatccctgtagtgttggacagtccaccaagacgtgggtgactgtttcttgcgcgacgcgcactgatcgtcgtcgcggaagccaatggccttcctgaaggtggataaccaattgtgtcccgtgcgtagctggtgtcagcttaactatgtacggttcgttccgccacgcactctcatgattcgccccctgcatttcctcttcgagtctggtgtgtcagggcttatggttcgccgtgcatgcatgcaatgcatctgcacgttttcctctttgtgattgcttcgatctttgttctaggcccctcttttactaggacgctctattgcttattgccatataccgcctcgacgatattattgtcagattagatagaccccgcacatctgctgacgagactgaagtctgctaccaatgctcaagattgcccttacgcaaaaattatccttgagaattagaatactcgttgaacaccttttacttagctcactgatacatcacctgcaacaaaatggagtgcctaggtgttcctattgaccatcgactgcggcgagtgattcgtgaggcaagacgtatcgatcgggacaaggaaaattccgaccatattcagcttcttcatagctttggatcatctctagaggttgacgagagtgactacccgatatgtgacctgagcttcggactcgaaatggcgcgaccagaattgaagggtggtgtccttattgtactggaacggcctcattcgaaacagaaaaactcggacggatttatggaaggcaaacgcaactgccgaaccattaatgcagtgtcggatcttatttctgctgtaaacaacgataagttgggttttgacgatgtcagcttatttgatgcaataccttttctagatgagacagtcgcgggaaaagatcaccaggatatcatcaatgaagcacagaatgttttcgccgatatggctagggctaaagaccctgatatcattctatgctgcttcaaaactgagactcaaaactctcttgtcaagaaacttcagagccgaggagtagggcggagtttctaccctgataacccaaagcttaccggatttggtttttcgtctacccttgtgaatgcatttcacccaagttacgctgttaactattatccaatatcctcttgcttcaagcaactcctggttctagagtttacgaaggcatttgctctttggaggcagagctggactgaagagccatggatgaaggggttaagagatgaatgccggatcagagcaaaaaggaaagtcggtggtaagaaagtctaacgtgatatactccaacactttctcattgcattatacagaaaagaatatcgacgggaaatggaaccgatcgtatatcaaagagcagtgggaagaacttcttacctccctggatgcacagtttgaaaaatgtttcttccaaaatcctaaagatatcggggcaggggatttgcagcgcaagcttgtggattcaaagatcacctggctatcttgcgatattgcatggattctcgaggaactaacccccgaagaaacaatcactttggaaatgccgcaacagttgttgtgcaagcttcgaagatggtgtcgtaaggcgtggccagaagaccaacttcgacgcaatccgagcaactctaatgggtactacgaccatttacccctcctgcttttaaagtcaaaccaaccgagcacacttgcaaaaagtctggagagcagactctttggcctccttcgcgatctgaacctctcttttaatcgattgcataacgatgtttatcataatttacttgcccagagatgtgcttttcgaaggtttgctgctgctttcgaggacatactagaagacattgcggacaatgatctttccctggaaggaaccgagcttcaccacgaaatgggcttcttaagtctgaatggaacagcagactaatctctctcgcaagtcacgaacaagagatgttgatggtgccatctctcgttctagcctttgggtccttcgtttcagggctgatgcgcgcaacgcgcacatctttcagttcaatacatttcggccattgaatttgagctaggtcaaatagagattagcgtgtttcgagagagggttctggaagaaatccgtgtgcgtaagtggtgaacctgatttcgatccaacctggacatggaggcgtcacagaggtttcgcagtcgtgcgccatgagggcagcctaacaatgggaacgccaattggccacgacaggccgtgacgaggctctaaggtcatgtcaggaagtggatcattctatgtgtacatactcggatatatagttgttgtatactgcatatcgctttggcgaggggtcagtgtaaatgatacctactactacctggacatggaaagctcgtccacggctaccactaccttaatttctccgcaacatctcttccatcaaaatgaagatttggcggtctgacaaaaaggatctcctatagcctattgctatatgctgggccggttggatgttagccacaatggtgttgtcgagggcgaaaagcatatggctagacaatatggcggtcacaaccagaatccactatagttcaaaagcttagcagtgttcaggaggaaccagaccgatccaacgaaccttgaacccggtgatggttctccctccctccttctccacctcctcggaggagctgtcatgcttctcactgagttgagagatcgagctaggagtgtgagaatccgccagagcagactggagctcggattcgcctttcagaacttcagtcattgcaactgatcaggcgctattgtccagatctatcgaggctgctctgcaaagaaatggattgcgagtgatctgatgggtctgctttttggattttttgggcacggttcgaattttataagagcagcgtggagctttaacaaaagcgatgtatgtactgaaaccatgaccactagtattgctaacacactatgggatgaaactggaccctggaatttacaatctgggattgcgatgggataccgctcaaacaaatgaaccggacgcgacgggatcccgctggatagcgacagttctttacgaaactcaatacgaagcaacaatgggatgcccctgggatagtgcaccgtccatacctgaatcccacacgctatcccagcaggggttccatcgccatcttactcttggcgacaacgacggcttatcccacggatcagggttcggagggctaattaaatagcattcaggctattgcaagcgaagctaaatggactccgtgatgtgagagtcagaataaatataccgtttacactctttagtatttgtctcccccaccataactgtccctttgcattccgcccgtctacaatctcgttgaaaatatacatctgcggttgacaaaaaacacctaccatcattatgaccatccaccgcattaccttgttcaacatccctaaaccggagaatatcgacatcctcttggctgaatatcgtcaactagctcatgaagcaaccagggtatgccttgaccgcctatccacattgacaaggtgtatgctgtcattttctctgactgacaatggcaagcgctacgttcgtgattgaaatacagaattcagagccttatattctctccgttcaagctggtcgtactttgcccgatgcacgaaccaagggctatacgctagctgtgaagacaactttccgcaatctggatgacatgagcttttacgattcgacctgtgaggcacacaaacgcctgaagtcggtggcagcacctcttagagagggtgatgtgttcactgcgtatttcgaagatgaggtggcattggcttgagtgtctatttttaagctttgagaaaatattatcgaggagatgccgataccttagatgaattgcttcaggattgtagtctatattataaggctgagttaacagacaagactgactttgggtagtagcttcgattattgtcaacgtcagaagtctcgatatctggcaagagtatcatgtcttgtaatttatatgccggctcaattcaactggacttttagtgttaactaggtgctatgttatcttttgcaccgttatttcaatttccatgcatgtatttgtacaagaaaagagagagatacactgcgtggagattatcctgaaaagtgtcatatccaatgaaattttgcatcacaaggctgcaaaagcggcgcagtttgagaaatccagttctcttcaatgttctcattgctatacgcggctgggttttccgcgagtcgcgcagccaagtccgaagtggcatgccagaactcacctttatctggcaatgcaaattgcagatctgtcagagacagaagacttttcccagggctgaaactgggcgcgtcttctaggagcttggggtcatggattcgggactgccggcacactctgtacaacgacaaacaaaatcgtttgacctcttcaataccgagccatataaatacgtcgggatcaactccaggcttgaactgagttaatatcgagggatagaagaacattttccgctttagacaggtgcgcacaagagcgacgagaagctgagagggtatttcaggcagagcgtgcgttaatcgcaggtctaaatggtcatggtagagaagaagagaaaaaatgagatgcaacaatattccttgatatgttgccattggccagggactgggctcggacgagggcgtttcatcttgctgcaattgtgactcgtgatagtgatttgatatatcccatttttcctatcgcactctatatcaatatgagaaaaacagaggaaaggtaaaggtaagaatatataactgactctttgttcatagattgaggatgtgagtttgtgatggaggtcttttgcagtctgtcgcgcattgctttccccggtcgcccaaagtcccatcataatcactgattgcaaaagaaaagctggctcatgatcaggatcgaatgtagcagggtgtaaaaaaggccattttgggtgaaaattcttgaaataagcctcgacgtatggtacgtatggtacgattctacttgggcatttttcaatcgtttctgcacgctgaacagaacttggttctgccgcaggagagtagggataaccaggctctacagatgctactgagctcatgtggccatcagcgttctttgtttgtttcaattcacgtcgtgaattttgggtgtaggagcattgaattcctcgctggaaacaggtatcacagggtgtctgtccgttgcatcttgaccttcgcgagcggcagtagttgcaggcttggactgcacgggatgattgtaactccttatttctatggagcgtacggacatgctgacgcagcgtgtcattcctagcaaaaacgcgatcacaaaaagggcattcataagattgtgattggaagtggcttttggcatgtcgtgtaagatgttccttgcgtcgatagccaaggccacacccggggaaatgacattggaacgagggtggctgcggagtcatcggaactaattaggcgatggagacgacagagcgtgagggaatgaggtgagcaggatgggccgggaagatcttcctgcccaaacgtccgaaaatcgacaatggggtcgtccaggagtgagaactagcagccacgctgcaggtataagcgatatggaatgggatggcgacacgaggtgggacccccgatgggaggatgggataccgatgggataccgatgggataccgatgggagtagccctagatgggataggagggatggtgggatgatgggaggataggaggatgggaggatgggatagcggggcaaacctttgcacgtcaggattggcaacgtacaacatacaagggacgggactgaaggaaaaaatcccacttcttggtggatcttcccattccttcctccagaatcatccgaatcattcagtaacttcatctccaattcacatagtctctgattatttttttgcttttaggttttgtatccttctaggctgtcttttcttctcatccattataagcatacatcatcattccacacaagagcagccacatgctgaaatttccctcaatcacttgttctgagcccttcaacttctcttagcatcgctgcttctcggcacagagagctttctgactcgctctgtgtgctgcatggccaccccacccgcctcttcacttcctgttcctagtgcttcctcgagggaacggttttttccgaaaacaggtagtggatacgtcaggattttgagcttatgctgcaaaatatctccttctcatctggaacgacttcgaactcctttttcgtggctttccctttccatcacgcattccctttggtacgtatgctaaagccattgtcattcgagacagccagaaggcctccacattctggaatggttatctccagggatatcttgggaaccgcttgtttcaacgccccatgattggacagaagaacgctgaaacgagtgtatacggcgatgttagccttctctctcaagcaaaggagtttgcacacgagcatcaagttagcgtcaaagtggtgctccttgccggctgggctgtcaacttttcccgccatctgcagagcgatgatgtggccttttataccaaccttcgggattgcagctttgacacagaatatatcgttggtcctatggacgtgaccgctcctcttcgaattcaacctttggagaacgagtccacactcgaagctctctatagattggaaagcgaaaagagaactgtttctcaatcttcctatgtgggaggaagcgccatcagggagtacagccaaagccaagcctccctgacgtccatgttcactgttcgtgaatcagagatccccatgcacaaagttgaggccctcgatgttaccacagaaacaacactcaactggccaactggccaactctccctggtccatgactcgagttactcatcggcccgagccaagatcattttgcagcacttctgggaagtcctccagcagatcatctcgagtccatacgaccgattcaagagtttgagtctcacgtccgagcaagagaaaagctccctgttgagcttcaggtcttcccgtggaaacgtctcccctcaggtggggcataacctgattgagaaacaaactcgtgataatggagatgctccagctctacagtttcaacttagcgaattcatgagctttgctaagctgaatgctgctgcgaaccgtgtcgctcatcgtctcactgggttgatgtcgacagggaccatcgttccggttcacatggatgtatccgtccagttcgtgattgttctcctggctattctgaaggcgggaggtgcctatgtgattcttgatcacttccagccaccatctcgcaaagcatacattctcaacgatgtcaaagcaccattctacatgaaaaatgggggccctatcaaagggattgcagatgtgctggcttactcaattacggatctcatgcatggttccacccccgatgcggaaatcgatttgggcttatctctggaccctgagcagcctgcatatatcatttatacctcggggtctaccggtgttctcaagggcgtggtcttgagtcaccgcgcggcttccactgggatcctctgtgctccagatatatccaacaaccgcagcctgcttttctacaatcccatcttctcagcagcccagagaaccattctgtctactctagccaagggtggctgtctctgcctggcaagttgatcgacccttcaggggtctctgatgcgcttcatcaatgatatgaaagtcaacactcttggcattacatcctcaaccattgcgctgttagaacccgagaagatacccacgctgcagagaatcaacctcacgggtgaatcactagaccattccgttgttgcgcgctgggccagtcatgtggagctgaagaacaactacggtctcagtgaatgcacacagctcacctggggacgacgcatgttttcgggagaaaagctgtcgagtcaaaacgttggacagccattagacactacatctgcctatattatggaccccgatacctcgaacctaacaccattcctggttctaggagagctgtgtcttgaaggtccccagattgctagcggttatctgaatcgcaaagaagaaacggataaggcgtttgttgatagtcctttcactccggggcgcaactatatcggactggcgacatggcaattcgactggaagatggcactattgaaattgtcggccggattgacttccaaaccaagatcaacggtcagcgagtagagcctggtgagatctcggctcttcttcgtcagcaaagctcggttcgtgcagcagttgtagtggctgccactgttgagcaagaaaaggctctcgttgcttgcatttcgccgagtgatacatcactatcctggcctcgagttgtctccagcctccgaacagcgacattggctagtctcccatcctatatgacgcctgcatactggatgccattcgacgacctgccggtcaatagcaatggaaagacggatgtgctgcaacttaggaaccgaatccaagcgatgaagcgttccgatcttattggtgcctcgatggatacagaggaagttcaacgagaactctctaacatggaaaaagtgctccagctggcctgggctaaggttctttctcttccatctgaggttatcacaatcaatcagtcattcctggcgctgggaggtgactcactcaaggccttgcttgtcatttcggaattattgtcccacaactacctcgcagagcttggtgatatgcttcgcgcagactccttggctacagcagcgtcttccttgacatatcaagaaaatgcatccgcaaaccaggattcaccaacacctttcagcttgataccgggcgaaacggacgtggatcggacaacatttgaggacgcataccctgctacaccttcccaagaaggtatcatctcagcgcataacagtgcagggggatatgtgtatcatcgcgtgtttgacatcgaagggtacgacgtgtctcgacttcagcaagcgcttcagatggtgattaacaacaatgccatctatcgaactgggttcgtggcgcacggcacggggttcttgcagatggtccatcgacagtttgagctaccttgggacattgtcaatgatacagcttccatcgattcctatgtatcacaggttcggaagcaagagatggacatcgctcaacctcttgttcgtgcagccatcctgaatggtcacatcctcgtggtcatcatgcaccacgtgttgtttgatttctggtcatccaaagttctcgtccaagatgctgcagccatctataataatcagactgtggcttctcggttgtcattcaacattttcgtgcggcactatcagcagcaagtggatgagaaggcggcctcagatttctggtccgattacctccagaatacttctgctacacgtttgaccctattagagggactgctaatgttgtgatggcaatccaggtcaaccgccaacgacctatgattgatattaaaatgtgggtatgggattatgtcaatggcaagtcccacagatcccaccatattcaggtttcagaaagcgagacggatggagtcaacctgtccgggggtccactcgtcattcccttccatctcctattcctaagaatcctcaaaccccaagagaaaccaacgtggtaatcgatgaagaatcgttacagaagattgccgagtggggatgggatatgcaatttcagtaaggacttatgactgattttgaatgttaattcagtgtctcagccgcacatagatttcgttaaaagaagattggtgatggacgacagagagattcgtttcgaagagacaaccaccccttgccaaagctgattattatcgagcttgtaagattctttattggcttttgacctcggcgggaaattgtgacaggtgttccaggttccgggagagcatgttttgctgtagcatctatctgcctgacaagaaagacaagaaatctacagtcatcaaaccgtcctagtccgttgctcttaatggaagcttcgtccctcctaagcacttggtcttatgaatgatgcgacttcgatgatggtgagcattcgttgtgatgtgcaatcctcacgaggatgaagaaaaaataaatgtacttggcttttatccatgtttctgagtgtaaaattccctgtttctccatttatgtattccttaagccttgggacgctctgggatatccttttccttattagccccagggaagcgggaacctctatccttgaccttcttctccttcttctgtacaactggaggcgggtaggccttgagggtgatttcctgccattcgggcgaatctgcgtaggctttatgaataggtgccataagacgggtcaaagcctctgctgctgcaggctttagatcttggggagtcaactaggtgatgttagtaggtttccgggagcaagtaaaaatgttaacatacaacgtcgtttgtgtaatcatctttgagttgttggatgttagtgtagatgagaggttcgttatcccggcgtgccacgcggaattccttcttgccagcgagggcggctgcggggagcaagacgaactccaccatggcaattatgccattgttctcgacgactcgagggaccgcttccgatttacggatcttcttggcgactatctcaggtgggtcgaggagatcaatcttgctatctacatggggttagttttgaaccttttagacgggttctttacataccttcgatactagagctcattttacccccacttaggcctgcaaccattggagtgataagatgggcacgctaggagttgaaaatcattagcgacattcattaagccttgccccatggacatatcctttacctttcggtatccgagtttgggtagccattctgttgctgcggtgaagagcttcctctggtccaggccttttttttggttagaaatagtgtagatatgcaagtaggattagacataccgcctagttcggcatcgaccttaagatactcctcatcgaggacctgaaggatcgggtagagcaggccgctcattggggcgttggtagattgcttcacaatctctgcaccagccttcctacaatcatgctcagaggtcatagcggcaagccggtagacatccataacatagtcggaactccgctggtaagaactcccgagcacgaactcgagcttctccgtcgacacgcccacagcctctagaactgccgtgatgatcttttcgtagtatttgacacggttttccaccagttcgagaggcgctttcattgaatctagaaacgcgtgcacgtccgcaaggagaataaccacctcacatcctgacgctagtagctgggcgatcttgattgcggcgacgaaataaccggaatgaggccgaccagttgtagcagtgcctaaaaaaggacaagatatgtcagttcgccatattgaatggtagaaggtagggagtcattaccccagtacacacggggattgcgcccctcggcaaggatgctctcgatcagttccgggttaagaatctcgccgagattgtcccgaatgagatcaaatctttcctccgcagataaagccattgttagacagattgaagaatgggcaatactaataatgtaaggggaacagataaagaaaaagtcggtccaaaatcaccccgcaataaaatctgcagaataaggcggtcacacggggtgagtcaccatcacgtgactacgtaacatctgtacctgacccgatcaataactataggggattggtgaggctcttcaatacgaatatagtcaagttctattatctagctggtttatcttctgtcacacatttcattccctcttgacattttatctgcatacgtgcctcaataaatacagagaagagatttaattggtatctgcttgaaagtagtgaatatggctaatgtacagtctatggaattgggacttcttcaacgatcacgatcaagcctttgatatctaggtggccaaatttttacatcaaccacttcattcggcgccccacggtggaatctagggtaagggtagcctcgagtcgcgcccaaaccacagccaaagttgccacaaccagcaatacaccgaccataatgctagtattctcgtagcttcgcggaccgacacttttctcgtggtttccgcggatcagtgcacccgcaactggggttccaactaatgtcgctaatcctcgcaccatatacagcaaaccattgacactgacaaagttctgtacaccgaacaactctactaggctcgtcgggaaaagagcgacgtatgctgaagcaaaaacgccatagaagatcgtgaatgcaatgaacagtgtgctcccggtagattgtgtggcggatagacacgagggaagccataatgcgaggacagacactgctgagatgagggttgttaataccagtgtgttgagtcttcccatacggtcagctgcatgaccgatgacgatcttgcctagcgcatttgcagcattcgagatggcaatgaagtttgcagacgttgcctgtgagtagcctagtgtacgggcaaaagaagcgaaaaagaagactggcgtgtagtatgcagcggactgtaatgccgcacccagagcatgggcaacaaatttgcggctttgaacgacacgccagtccactaatggaaggcggaaaaatgtagaagaccgggaagaagcggcgttctcggcttgaatacgggtgatctgactagcaggccagcgtataaaggtccctgagccgcaaatgagtgcgaaggagatccccgccgtgacgcgaagtgtattgcggaatccgagggactcaatgaggtatcgaaaagcgaggggccaggcaacaccgccgatcccagttcccgcgaggattatgcccatggctagtccacggtgcagtgtgaaccaggtcggtgccacagttacagacggcatgtaagttagacacgtggccataccaagcagaatgccttgggtgaggatgaattgccacaggtgttgactgaagcttgcaaataataaggcgcttgaatgaattattccgctagcccagatgacatatcgagggggatattgctttgtccatgccgttgcgaatggcgcaccaattgtcatcagtgcgattgagagagtaccgataaggtcaatctgcgccggtgttgcgccggtgaacggggtgtttggctcctttgacatggagtcgtagagctcttgaaagacaccgaatgcgaagttaattccgcatcctgtaaagacgagggtcgtcgaggcgattataatgatgatggagtgtctgtagctgtgttagtccacctcttatggaggtggctgcggtacgtacagacgagttggtgagtttgccgggttttctccgtcaaccagcatgggtgttaaagaacgttccatccttggtagtagtataggtcgaatttttgatggcaacgggggtggacccgcgttgaaattgtaagagtgaagatgtatatgaggggtgacacgtaaggatgcacaaatgaagtaaaagagaaaaaagatgcatgtcttttgaaaaagaagttgattgttcttggcgtttaagcttatattaactgtgaacccggtttaaccctaacattctgagtcatcgcggggtatggccgaggctgtcggatttaatatggagagcactactgctgccatgaagataaacataactgtggcgacaggaagtgcagcagaagggtaaaaagacagtaatgtccgagtgaattcccattgaactggaaagcctgaaaatccggctcgggctatgatttagttcctgtttaggggtaaagaatggtacgtaatcgccgttagattcttaacaatatttatatagatcaacatcttaagccatttcatcctttaggaaattaccgcgttatcctttatgatgatagcaatgcgtcgcaatgagggcgaagcttccgtcaagaacagagcaacggactaggacggtttgctgactgtagattcgctgtcggacagattggaggcaacataaattcgtgtgtctaataaaagagtgtgttggctcttacatatggtctgttgtcgtattataaccgcattgaatcgtcccggcgtaatgaagccggtcgacatcctgggtagctgggcgagccatggctggaaaatagcaaaaaggatacataaataatccgcctaaagctgcgatggaaagctatggcaatgtcgttcgaattgcccaaaatgatagacagagaggatgcatttaccctattttacgataccatagcggcatcagacttggtagttcgagcaacatgattaaaaatgtcagatgagcgtatcaatccaattacgggttcgtagacaattgctcaatctttggctccatattcgcaatccaatatgtttttggtagaagacggtttcggaatttggaaatgccggcacactgtgctggacgacaagaggcggtagtgactttgtttcttcgtatcatgaagacaggagaagagagaaaggagtaagagaaaaggagaagggggggttaaaataaggaaagagaggtcagatgacattaaagaaatgaggaaagagcagaggtctatacggcaggccctctggatacaaacagaacagtcatcagtccctaaaatttgggcatttgccccatttatcatggggttgaggtgttagatgaagaggaagtaagtgcaatactgtataaacatccatgaccttcagtctctttcttcttttttcaaccacctgcctctcacctctgacttcttcatacaatctcataccgttctctcctttttcactgaacttcaccgtgatgtcgatctctgagagagaatgccaatgctgcgatggcaatcaaagtcaaccgccaatggcccacgattagtattgaaatgtgggtatgggattgtaaatggcatatcccacagatcccaccatattcaggtttcagaaagtgagaccgatgaagtcaaactgtccgggggtccacttgccatttccttccatgcgatttcagtagggactcacgactgattttgaacgttaatttgacgatttataacgatttgcatgctatttcatcacatgctcaagatcatttagttgctttgtttcctttattctacagtgctattttagatacgaatagtacttactttatactatatagagcaattattattatttcaaggatgctcttgtggggtgccaggtctatcagaagagaaagagggcatctcagcgaaataatcaagatggagagaaaaaggaagcaagtgtaagagtgatgcagccttgttatatagctgctaaccactttgcaaacgttgcagacctcgaacgtctcaatctatgaagaaagcatgcaaacagcatgagaatcatcgcgagtcaggtctaaagcaagtatactactggttcatactctctcattggatactaccttacctttatcaccaccttcatgagctatgtactaacttcttttatttggacaataagacgaccaggcattgatcttcgactatatgggtctttggtgtcttttatactggtttttgtactacttgttatatggttttcaaatcgaatatgataggcaagttatatgcagccctaaatgtatacaacttacgaggtacattccatggaaccttccaaccctggttccagggttccaatgcgagggtggatgactaagattatgcccggcaataatgtccaataggagagttatgcaccggttaatcgcccggaggttatcattcggcgagggctcccgatttaccccgcatattgtctgataagagataagcactatgttccgaggtccacatgtctcctgtctaatgttctcttgactttcaccagactcttctggtatttacctgctctttccatgacccccgatcgagaactaaatcagggtaccaagcgtaagcgcggggagcggagacgcgcctttctggcgtaagtacattgctgctcggcatcatttcgcttctcacattgacaatcctcaaaaagttgcgagacatgtagaaaacaaaaggagaaatgtgagggcggtccaccctgctggagatgtcagcgactagggcgaccgtgtcatttccaaggccagccgatccagatagcgacatccccctgctcctcaaccgtccccgtcgcgtccattccgaaagaccagagtcggcgaatacaaagcctggaggatatcgcccgtcattttcttggggatgtgcctctagatgaggagaatatcgtccgtatcgcggacaaattacgaagctcgacgaacaccgtcccgccggaaactgccctggatatcaacgagtcatttgacgttcagttcgtgtcagataatatggcacattactcgggagagttttctcactggaatttttcccagacattacgccgcaaaatgagctgccaaatagatcagtttgatttgagggtttgtatctctccccgcaaggactgaagcgtgtctaatgacgtacaaaaggttaaagaatactggcggccaacccagcttcaatccccaccagaagtgatagtggagacattgacacatttaccaccaagagctattgccgacttcctcatcaccatgtttttcaaatatgttgaggtcaactccttttacatggaacggaaatggattgaagagaaggtagcgctctgttacagtccgaaaactacatatacggccattgatttcccttgggtatgctctgtttttgttgtcatggccattggaactcaggtagcccacatggaggatgaaaaaccaaatcccgcttcggagatcaccgaagaactgaatttgtgctctgaagactctgtcgggctagtcttttatcatgcggcatgcaagctcattcctgatgttcttttggttgcttctcacgaaagtgtgcaggttttcttgcttctcgccacatattcattacctgtttcgacaggtggccttgcatatacctattacggtcttgcaatgaagatggcgattcaaaatgggatgcatcgcaaatatcaaggtggtaactgtgactccagaaccatcgaagtcagaaatcggttattttggacagcatacactattgaaaagtacgatattcaagagggcatttcacatcaaagctaatcaatgcttatagatatatcagcatcctccatggacgccctctgtcgattgcacgatcggaaataaacgcggatatgccaagagactgtcccacctttgagtcaccacgatttgccaacctaaccgcgttccatacactgatttcatacttgggagaggtctccgagacactgtaagtggctcaaaatgtgaaaccagttcatcggtgacatgctgatacctcaatagtgcacaatttaaaagatgtccgaaaaggcttctctctgaatatttagagcgactcgtacggctaaggacgagtatcaagcaatggtgggactcacttccagccactgaggaatgtcgagatctatgctcgcaaggcccgaatttccggcaaaactcgcatctccgactgtgttacctgcttatatatgtgtatatgggccgtgcattcatattcgttgatgacaggaaacaagcagatgaagctagggttggtccagatcaagatttaggacgggcgcatcggttagttttggtggacgactgcgtgtcgagtgctttggacattcttaacactctgcaatccttatccgaccacgttggtctttgccgcgcttcttacaatgaattcggtgcttgtcgtgcggctattctggtcattcttgcagaatgtctcaacgcaggaaagtgccagagacttcaagatggcctacaccgtggaatgagtctcatacgtcagatggtcggaggaagctcttcgaaatctgacatttcatatctcgaatctatcgaagcagctatcacccggctagaagccattccggaagaaggatccatttttcatccacaaagtgagaaaagctctatctctgcctattcgaagttcaaagactggacgcagtcactgaagaaggacaaatctgcaagtggaaatttggagctgtcttcttttagtccgctgtcgcatctcacacctagcacagaacctttcgtggacccggggctgaacgatatgacaactttctttgagtctcattggtctaatggtgatttccagtttgacgcttataatctttcatctctgtcaaattgattttatatggaggcaataaaactaagattctatgttactgcttcccttatccaaacaccgcatactgagcacgttttctccaagtcttctgcttgtcattttctggattccgctccgcatcttcggctgcaatagcattgataaggtcctgttcatcgaaggctctggcagggccaaaatccatgtcaaccggcttgactatcttcgttttaaaataccactgtcaaagtcagacatcttccatcgtcaaccaatttttaagctctcaccttatatgcgaagtaatcaaagacgaacaatggagctgcgagataagaagaaaagaagctcttcactgaacccttttctccaaatggccaacaagccaggtagaattcacacccaaagacaaaggccacaatgaggagactaaagtattgcgcccatggagtgagaagacctttgaacggaagtgcgctgagatccttgttttgagctcgaagtccttggcggaagcgaagatgagcaatataaatcgagccccattggaaaagcgtcgctattgccacctaaattcaagttgtcagcaacttcacatattaccccttttgccgatgtacttactaaggccgaaaaccaactatacaccaaagtgcccacactgttgcagttgagatagcctagcccaccaccaaggcccaaactgatcaagagggacacatagggccgaccctgtgagtcttttcttccgaagaacggatgaatgatctgcaggtcagctagtgctgtcaaacttcgacttgcgatataaacactagtaatgccacagctaatgacactaaggaagatgaacccgttgatggcgtgtgcgaggccataaacatccgcccgcttgactgcaatgacaaaggggcttcccatagtcccgctggcgttaacaagatccacgtcattggagggaacacacattccgacaagccagatattaaccacgaagaaggtaaacattctccagaaaactggtcgaacggtcttcttgatagtgcgacggggatcggctacctcgcccgctatcacagcgatatgctcgcctagcttgagttagtatattttcctcaattcgagctcggatctcataccgccgccgaaactaaaggccgcctgcacgaaagccttggaaatgccctttattccattattgaaagcaccggggttcttccagtatcggaactcgattggtccgtttgttgctgctattcctcccgatgtcatgatgaacatgaagaatatcatcaagataactgcaatacacttcacgaaggacatataatactcgatatagccgtagactcggacgtggaacatgtttgcgatggcaaagactaccagaaatatagtgataaatcccgcgagtggcacaacatctgtctgtggccagtatttcaggacggatatcgctgctgttatctctgctgggatgatcatcacccacttcatccgcgttagtacatacgaccttgatgttctagtaggctgacataccgcaaaccagaagttgacaccaatcgcaaagccgaatgccgggtccacatattcagcgcattgtcggataaaaccaccatgaataggcttatatgtagtcatctcgccgattgaagagtattgggcgtacacgatcatcctgcagaccgtgttagttacaagagtacaagagcagatttctctggagtaccctacgctgtaatcgtatacgtgattgctataccggcagggccggctatttattgtcaatatacatcttgaagggaatatcggggtttcaatgctcaccataatgcaatgcttgtccagttcccacccaaagaccagtaccgataccagcgccaaaggtcatcatcatgatctggcgcctggtcaaggaacggtgatacccagcatcgtccgacgcagatagaacgagagtgttgccatgacgctcagttcctgagctggctgagcgctcgatgtcatttgtctcgtttgtcttgagctcaaatgcgtccttcgaggtttgtattgaagattggttcatgctggtgcctgcgtgagtcgtagatgtgttttcagcaacgagaaacctaccatctgtcaatttatctgagatttctagggttagttcccgaggtcaactgtatccttatcgctatctctggtatctctttaaagtgtttacattcccggcgggagcaatttcgcacttcccgccggcactgcactgctagtgtctttagggctacggagtacatgtacatacgcgagtaataaccggacctttacctgtaattaccagtatgaggaggataatttgaattacgtacagttcaagcctcgaatcaaagcatgctatagatataagataggcttaactattcaatatcatcagatctagtgttttggattcctggaaaaagtatcccctttggattgcctcatcgatctgtcagttgcattgaattatgttcccaccttgtgcaattggaatctgatacgatggaacacaatcggaaattgagagtacaatgcctctttaaattcgtcgtctcgatcatgataatgataaaggttatacaccgcaatatcatatcactggggtgtcatacgtagaccagcttcatcgacagaacactcgtgaaagaaattgctgagacggttatagtaacggcctatgtactctttaggctcttgtgtagtaagcttgtagccgttggcccatgatgtagtttttagggtcggaggtatcaagaagagcctccagcagaacctgactgactcaatcaggggtgtcgcagagatcaaacgagctccccaggatgacaatggcagtctgtgtccgcaagaagatatacagcactaagcccgggagacagatccttgaataaactacaggggttgtcatctgattgacgcttgcagtgtgaaaggatgagtgagatgtagctgaatccatgtatcctcaaaggataaacacaatgctatatacacactgattgaatgacttccctagtgaaatttgatatatatctggatagtactggccaccaaaatctgggaatatataataatacaaccatcttattcgtaatgaactagtaattgtatgctaattaccaacagtttctaactaccagatactactaccaaagtacaatctacatctgtacatcgacaacctcacaatccgaccgcgtaaccggtgcggggtattatatgattcatagtttcataagtccgagataagttcaacaagggtgactcgctactatttatccaatctacgcccctgcctttctttatctgcttgaaagatcatttcgcttcaaaaaggtgctggggataacgattgatactccaaatccccaacaaacgactccaacattgagacccaaccatgtcctcatctaagcacgttgtcttcgacatcgttggtactcttgtctcatacgataatgttttcgacgccattgatacccgattgggagaccgattgcgcgcagagggaatcaagccccgtctgctgggatttacctggatggaagcagccgagcgcgaatacaccaatctaagtcttgcccaaagctacgtccccttcggtcaagtcttccgcaccctattctatcgtatgctctggatggctggcattgctgagccacggacctgggcttcccccgaagatctggagtatataatggcggaataccaacttctcaagttccgtccaggtgcggcagagtgtgttcagaagctgcgtgatgcaggctttaccgtgtgggcttttaccgcagctgatatcaagcgtgttgggggctatttcaagaacgcgggcgttgagctgcctgcggagaacttgctctcttgtgatgacgtcggtgtgggtaagcctgacttggcggcttatcgtcctttgctggagaagctgaagtcggagaatgatgggaagacgccttggtttgcggcggcgcatatgtgggatgtctctgcggcgaggaaggctgggtatgtgtctcgtctttgagttagaagttgctactggttattactgacactttattatacagatttaagggggcttactgctctgtatgggagaaggagtctctgtcagaactttttggagaaatggatgttttggacgagactttgccagggatggcagagaagatcattgcccaccaggcgtcatcttgaaggcttgcacttagtcttaattacatcaacctgaatagaatgcccttttgttaaacatatttgtcccgcgtatatttagaagttagaagtattaagccattataaaaagaagtatatagctacagtaaacattttccaacctcaactctcaacaaggttgattttaagttcacacttctcttttttatctcccactctaaactcgaatcattcaagtcaactcctcaaagtattattagataccgccggacaaagcgttatcactgtacgtccgatgttaagtagccgggtcaggaccgggaaagttaccggtggaaaagccgccgggagggaaacacctccccagtcctcaatgccaatgccaataaataattccgattcatttgtgtttcctagcctacttccaagcccgctaatagccttggactctccaaaatggaatcgaagcataccccagtcccaaatgggatgacgtcattctggcggacagagcctcactttctggacagccatcgatcaaccgaatctctccctcgggagtgtgatatcgtcgttgtaggagctggatatgcaggagcatctgttgtgcaccatattctcgaccaacttagccccgggtcgacgccgccttcgattgtgattctggaggctcgacaggcttgttccggtgccactggtcgaaatggtaagattggatagctaagagtgataaactttgctaaaatatttctgttctgcttattgtaggaggacacatgaagccggatgtttataatggtatcgctagcttggccgttgatcatggtgtcgaggctgctgctgaggttgccgctttcgaggctaagcatgtctcgtttctcaaggagttcgtcgaaagagaaaagatagactgtgaatacaccgtcacaaaggctatcgatgttcagttgtctcggagctatagcgcaacactcaagaaggcatacgatggattgatcgagaaggggtgtgaagcgaccacgaaggcaaaatatatccccagaaacgaggccgagaaggtgagcacattttcgaaatgtcatatttcgatatactgaccagctatccatcagttctctggagtcaaaggggcacaaggttgtttcacatatgacgccggtcacatttggccatacaaattcgtgctgcaccttctggaaaaagcaattgcggaaggtgtaaatttacagacgcacacacctgtatctggaattataaagtctactccctcaacatccagccatccttggacagtgaatactgcccgaggttctgttgccgccaagacagtggttctagcaacgaatgcctatacttcgtctctagccccgcaatataaggagaagattatccctgtccgaggaacatgcagccgaattgtcgtgcctcgaggttctaccgctcctcctctgacgaatacttacaccctgcgctggaacaattggaattacgactacctcatcccacgcgccgatgggagtatagtcgttggcggtgctcgcccggctttcatcgatgatctagacagctggtacaatgtcagtgatgacagcctggttcttgagcctgctgtccgatactgggataattatatgcagcggaactttgtcggttgggaaaatagccacgcttacacggacagggtctggacaggaagtacgttgctcaatctatgatttccctgcgtgtaccactgaactgactcaacttctctatagtcatgggctattcgtcggatggattaccgcatattggccttgtcccaggacagaaggatcagtacattatcgctgggttcacgggacatggaatgcctcaaattttcctggcggccgagggcttggcaaaaatggtactcaatgatatcgattttgcaaagactggactcccgcggctatttgagtctactcagtcccggcttgatagtcgccagaacaagatattcgatagcacccccggggctgggaaaccccaagcaagactgtgagcaggattcaaattttagatgcaccactactagcgatttaatgaggtacatatacacatgtctttgtattgcatgttagcataataaatagtggtggatttttattttttattccgtatagaaccttccaggtttaaataccagctacctgtaagcgaccactcggggtggtgacgcatacgggttatagtttgctgggagtagacgaaccaaagcctgtcctaatgtgacctaccgtagggggtagcctaggttctatactctatacaagcctttaggcattcgaacctacccagcttagtggctacgccgccgnnnnnnnnnnnnnnnnnnnnnnnnnnnnnnnnnnnnnnnnnnnnnnnnnnnnnnnnnnnnnnnnnnnnnnnnnnnnnnnnnnnnnnnnnnnnnnnnnnnnnnnnnnnnnnnnnnnnnnnnnnnnnnnnnnnnnagccttccgcccccccccccccccctcccccgggggggggtaggcggtaggggtagacttatttgcttatttacttacttgcttaaatgacctacagccggcttagtagctacgccgtggtttacttatttacttacttacttacttgctttcttaaatggcctatagccggcttagcggctacgccgcggtttaattatttaattatttaattggttgattgtttgcttggttaaagggtggctacgcaatcgccgccggtatatattacgtaatcatactatacagtcacgtgccagatgcataatgcatatatatcacgtgattagccctaccctagtcacgttactaccgaatttttgaccaatcagaagccatacatgagaatctgagattacgtaaatcgaagtaactaacgtaattcacatacgagccgccaccacatacgacccgccaccccattcaacaatnnnnnnnnnnnnnnnnnnnnnnnnnnnnnnnnnnnnnnnnnnnnnnnnnnnnnnnnnnnnnnnnnnnnnnnnnnnnnnnnnnnnnnnnnnnnnnnnnnnnnnnnnnnnnnnnnnnnnnnnnnnnnnnnnnnnnnnnnnnnnnnnnnnnnnnnnnnnnnnnnnnnnnnnnnnnnnnnnnnnnnnnnnnnnnnnnnnnnnnnnnnnnnnnnnnnnnnnnnnnnnnnnnnnnnnnnnnnnnnnnnnnnnnnnnnnnnnnnnnnnnnnnnnnnnnnnnnnnnnnnnnnnnnnnnnnnnnnnnnnnnnnnnnnnnnnnnnnnnnnnnnnnnnnnnnnnnnnnnnnnnnnnnnnnnnnnnnnnnnnnnnnnnnnnnnnnnnnnnnnnnnnnnnnnnnnnnnnnnnnnnnnnnnnnnnnnnnnnnnnnnnnnnnnnnnnnnnnnnnnnnnnnnnnnnnnnnnnnnnnnnnnnnnnnnnnnnnnnnnnnnnnnnnnnnnnnnnnnnnnnnnnnnnnnnnnnnnnnnnnnnnnnnnnnttcctactatatataataaagtcgatagtataaagagtttctaaagctagcgaagtctaattttatcagaagtccaactgtttagactaatttcaaaacgccaattatttagaaggccgttaaaccaagatttaataaagactttacctttaaaaatcatatatagaagaagcgcctaccctactgtatttatatattcaattacagtcacctactcgcgatttctaggttataaaagtaatctctaactataatattcacttctagttataacctttgctattacggttaatcctatagtaaaacctatcttattgaagttataaatatcgtccggatcgattctatactaaagaatggttttttgaactagatcaaaccactctctaataatccttaggtctttacatttcgcgcgctcgtaattataacgtcttaagaatcgggatataagggtagggtgctgtttaacaaaatgtataacctaattttggctaactgaaataaccggggtagttccgcgttgtttaagaagaagatccgccatttctcgtacgggttggtattcgaagataaatattcagttttgaaaggacccgatcaggtaaaaagggtactaaaccagctgctgagaagctgtttttaattatctctaatttaaaagctttaatttatacggtagggtatgcttcgagaaagtcgagtttattaatatagttaatcctgttctgtattttcgttttaattaaccgactatatatccgttttaagactataaaacagccgatattaagtagttgtaaaaggtaagaggaatacagtggtatacaaattggtataatatcgttttccttataaatttagtcgaattaaggggttaaatggcttctataaccattgagtactaaaagtcgataccttcctactatatataataaagtcgatagtataaagagtttctaaagctagnnnnnnnnnnnnnnnnnnnnnnnnnnnnnnnnnnnnnnnnnnnnnnnnnnnnnnnnnnnnnnnnnnnnnnnnnnnnnnnnnnnnnnnnnnnnnnnnnnnnnnnnnnnnnnnnnnnnnnnnnnnnnnnnnnnnnnnnnnnnnnnnnnnnnnnnnnnnnnnnnnnnnnnnnnnnnnnnnnnnnnnnnnnnnnnnaactaaatcaaaccactctccaataatccttgggtcttcacatttcgcgcgctcgtaattataacgtcttgagaatcgggatgcaagggtagggtgccgtttaacaaaatgtgtaacccaattttggccaactgaaataaccggggtggttccgcgttgtttaagaagaagatccgccatttctcgtaccatagagggccggggggccgatccacgagaatccatagagattatccattttcgaagagattcctcttcaattgcggtcaatttagtcaagttggcgcgagaagtcgcgcggtgttgtataccactgaggcggtcccgaagggttgaacgcggtacgttaaaagtgcgggcggtagtagaaatattggaaaattcttgattcttaaaagcctggatagctaataagatcctaccctctttctctattgaatctttagaggattgagagcgttttggtggcatggtgggtggttgaattaactaggtgctaattcatggacgcgtttttggatggggtggcgggtcgtatgtggtggcggctcgtatgtgaattacgttaactaagatgttggaaataaggtaatcaagtaccagcgtaccgatcaactcatccttcttgtgggtgctctaggatattttttatagcatacttttgacttaacattttaacgttcctcttcatgttatagaaaatatagtccagcgggattaggttagaacacctgccaacaaacggagtaaggactaagcaggataatgtttccctcgtttcaaacaccccatgggccttattctgccggctgggccattctgccaaatctcaccgtacagcttttcgccgccttgaaacctagggaccataagaaaaggcctatcacgtgatacgcacacgagcttcgctcccttttttacttgcgacacactccccgctaaactacttcgggtatatctcccgctggccgcagtttccaatcagctcgtgtaatttactatggtatccctagagtgattgtaaggtactgtcagccatgaagctatttagagattatctgatctatcgaacatgaagctattcggagatcacctcccttcgtaaagtttaatgatcgaaaaatacagcgcataacaaaaaccaaggttcctgtttaaggcctaggggggccatatcgcagtctgatattcaattcttaatgctcaaattctcattctctatactgaatctagcctagcagacaagatgagagcgatacaacaacccaaaggtcagctagagttacagactatggagatcatcctcgtatcctaatggaatgacattctgtaaaacccttgtcattctgtgtctcttgtcatccattctcctcgatcttctccgtctctcttctccgttgatttctctctgtggtatttattcattcttccttcattctttgttatgtctcaactggatgttttcctcaataggaaacacggtcaggatcttgccttatcctgcaaatcctcgcattgagagctgaccagttaaccaaatattgataatggccctccgaggtggctaaacaggactagatcaaatacagagggggcattaagagaaaagcgaaagcataaaaccaaccgacggagaaacagttcaactcagactatcaattcaaccctacgataaccgatcgccaatatctcagttttcaccttccatatgtgtatattttctcaagatgagaagatggagccgggcttacattgaccagcaatctcagggaatcagttcaaccctgggagggaagtactcgaacgattgccatggtatcgcctacatagcctttgtgaatctggatcgacgatatgagaggcttatacaatacttggagtgacttgagctttcaaatacacgcaattataacccatttccctctaacattagtgcatgcattctttatgtaacttccaagctcgttgttggaggagagtaggaacaagctgtaggccgaggcgaaaaaatgaactccagggctccttcctcgtcagggaacttttttctttatggctgaggtcacgttccaattcccattcattttactcttcccctcgactcctcttccctttcgactagatctaagcttctggaaccggtcatcactgtactcttgccactgtccaccgatcatcatcagtgcttcagttccatcgcatatgctgtttctctacttcttattggcttctgatcctctgacgaggttaggtctctttttcatctcacttctggccagcctgctgccgttcgaaatgagctcaaagctacctccccgccgcaccagggcggatcacaatggtaagctattatttccacagccccccgtgtaactgacatgagctgacttgagataaatcacacagccgaagagtggtgggcactgcttgagattcccaaaaccgaaaaggaatgggaagacgcagcctcaaatccatacattcccccgacgagcgctaagagcgaaacagaaaagtcaaagggcaaagagccagccaaaacgacagataagccacaaaaggcacccgatccgcgccatgggaagaggattagggacctacatgtccgagaaatgaaaggctgtctatccgcatctaagattggcctcccagaatacctgactggacgtatcatatggcataaggctaaaatcagcgacctctctatcgatgaaaaccagtctaagccattgacagatgttcaaaaagggctaggatttgagaaggcagctagagagtttgctgccaagtaccaagcgaagaatacagaattcaagaagtactataagcatattaagaagtatggcggttctctccgtaatgatgaacgccgttgtaccggtgagtacgccctcgtccgtgaccttcaactcaatatcattcaacggcccgacatcgaagatcaacacttgcgagagctttccgaaaaagctaggatctgcgagatgtgggcgaggtcgcaatgcaaaaggaaagtcgatttttcttgagaccacaatccgagcaaggtgacatggacatggaccggaatgatcaggagtctgatagacctgccaagaagcagaagaaatcagatgaagatggtagattgattctctacgcggatggacaattagtcaaccctcagaacaggaatgacatccattgtattgtggaggtcaagcccaatctcttccggtccaaagatggctatgagaatttcctgcgccagatgggctgggagatgctgttttggattgcgaattgtcacaagctgaacctcatgaaaaaaccggtaagccgaaattccgcggcagctaatgcagaacgctaatcaaagatacagatggatcatgatggctgaatgtgctgatgaggtttacctggtcatcgccaggtttgaacagccgtggcttgactatatttccggagaagatccagaggacaatcagcctggtgacagctttctgcatctctatcttgcaggaccgctgagtgtgtacaaccacaaacatgtcaagctcttcggaaagtttgtggtcactttcaccatgcagcaactgttggatgcgtcacgttgatcaagttacttcggcgcagaacattgtacccggcaagctttctcctcggctttctcctgttttcttctggggtttgtgccaagaacctcgatttctttatgaccgcaggagatttcatcgcgctgtttgagggtgcagggggtccacggctcagcggtccacgcgctagttcaacatcggccagtttccagcgtctcgactccggtcagtcgatcgttcagcggagatcaaccctccccgcgaaccgccacttcagtgagatttcggtgattgtcgggaacgagtcatgctcttgctcgcttgacagtccgtccgaactctctatcggtattgtacgcatctgatgactggtggggggatagctagactccgtcgccactacatagttgccccggacaatttcattgctctaagcttcccgttagcatcaattcgcttatcccaagtaaattaattatgtctttaacacttacactttcatcgtcaaaaataaaggcagaatacgcggccgactattcttgtggtttcaatttaaaatggagcaaaggcatatatcgattatgcagaaagcagcaacgtctctctcctcctaatgtcaatttgaaccacccagaccaaacataataatatggagccatcattgtagcaacatcaatgttcaccgtgtcataccctggcccatcacagctcattgccctcattttccatgttttttgatataatgggcaatgtgagagtctgaacggtgttcatctgtgccagaggccatgcccaagcaaccaaatcgctcatcaattcgccataccatgaatcattaacccattcccgatccaaaagatcgccgtaattatatttatctgtcgtgcaccattcaaagtctacggactcggtgaaatggactttcagtccattatcgtagtacccagatagtacacgggcacgagtgtgatcatcgaacgtgacaattgttgtctggctttccttagtattgaaatatgcaatatcagagggaatactcacggggaaaagatggtgcaactggatgttctcgtcctgcgatgtaccgacacgtcttttttgggagttcattgctttcaacattcgagtggctagcactaatagctcggtaatggatggtcggttctcatcagactcgtcaatcaacgccacagcccattgatggcattgaagaggattgtttctgtttcctgtgcgaacaattttgaaatcgtgatggttctcccgggattcgaaatcatagggcattggataactataaagactgtcagtgagcgatatgatttcgtttttcaagcattcccactgactgataaacattccattcatataccatccgggcttcctcggcctcatcgatctttctttgcctctctgcgatctgtctccaccactcttcctgtcgtttgcgccgctgtacttcatgctcttcactctccttgtcactttcctcgtcactatcccactcactacacatatcttcctcgctctcctcagaactctcatcaaccccttgaacgctgctgcgctctttttcgtcattattttgctcgcgcatctcttcgtcagcctctgtacttttttcatcctcttggtctttaggtaagtatcgattgagccatttgattgctgtttggtagtataagaaggccgacatcaggtaataagatggtagaggccggcgggtggaccataatccccattcccatcgccggctcacaaagggctcttctcggattttctcttgagtaggatctggaacatgttctgctccattaggtgcaaagtaaggagactcagaacctgtcttcagatccatttcagcgactgagatacctagatgctccatagtttcgtcagtaatggaagcaccttccatcttccgtagagccgcatggatgtctttcatatggtcatagctgtgattgaaacgccgaagcagtacttcagaaatagagaggtccatcattttcaatgagaattcaagatggtgtatcgttcaatcaagtagattggaagagaataagttaagggaagagagcaaaagaagactttatgtgcgaagggaatagtcgacgtgacgtcagaaagcataatggacacttgctcaaattggtttagtactatcgaattgtaccattggtcatgagaatataaaatgggttggtccgttctcgaaaatggcgccggagctcaagtgactagtactactggcccggacggttagttaactagcgaattccagacgaagcggtcatgtgataactataaaagcacccctggtgcacaaatccaattaccttcctttctactagtagtcatcccaagtgttgtcctctctagcaccctactattcccagtgaacaactttactttcaccctgtttcacaggcagggcggactgtcggcacccctgctgcctccgttgtagagttccctcttcactagctatatattgaaggtacaggtgagatagcgtggtatatagacaattttatcgtagctacaccaactaaagcgatgctatacctaagcctaagccttaaataggtaccttggtttttgttatggactggtggtaaaatgcgctctatattttccatcaaaccttccagatttcttagaaacatagtagttttccataccaatgaaatgaactgcttcactcagccagtgaagtgagagatctgtgcaatctaaggaaagcattatgtttcgtattaatctcgaaggccatggcatggctaatgaatagagtgatgttgaagatacgctgcttatgatgtttcagcagctgtgcttgtaatacctggcataccagatcggcagacaacattcctttatagttacatctgtagacagctttaggtttccagagacacaatgactgttcttctttttacagtgagatctttcacatatagggaacgagaactcagattatagccatcatctgacagtagaacaaaacatgtcaaacttcaaccctaaaaataaaagtaacagcagtctagctttcattttccgcagttacaattctgaagatttcatttgcgacatgtgggccaagaatgtcaagcgagccaatgctcatcatctccagcatcggcatatcaaaagagaatacttgcttaattaaagcgcgtagctcgagagatggccatggcgtcaatgacatcctgttccagaacaggcttgaagccactgcgctatatctcgcccatcataccctggtgctccgaaatacagccaacgtcttcgacggctcccatatcaaggattgcatcgtcgccagcgagaggaacacgccttgcttgatatccgagagacgcagacagctgcgaggtaacgacttcgaaaaagaggctctcagctgggtggttgtaggctgatccataagcgaagggaaagtagagttcgtacttcgagtaggtgtgttctgtggataggacatcggctaccacttataagatcaattgtagtcggggtagggggaattggtcttgctgaagcaccatcttttatggtccgagaaggacccaatgaagccatggaaaaatcaacaattctcaatattctgggccgagctgcaccgaaaatccgaatactagttaggaatagagcggaagtacgacgtatggagtggtaaatggaatagtattgtagataatctagaagtgaaacccccactacgaagcgtccttttggggggatttgatgcctggatgccttatcttagagcggcagaaattttaaatacctgaattaccataacagtagaaaatggccttatttctcggcatttgaagccgtctaccaacgcttaatctggccgccgctcgaagtatccctcgaggtaattcacacacccttacattcctattccgtcgctgaccctgttgttgtcgcagccgcaaaactaaagccagtccgtcgcaagcgtgctagatctctagctatgtactactcctgcacctcagcggagacggaggatttgatcccctctacctacctccctcccccggttttatgccgaggaagaaagaaggaagaagagaggagaaggagagaaaaccaacattaggggcttttatatatcaattcaagtagaactttttttggaactcaaaaaccacccagaaacatagagatggcgaaatttgtatgggcccaaaggcttcatctttttaaacttggaattaaattttacaatacattggaaagggcggtgtcgaaagcggtgctaaaataaggcaaccaggcaccaaatccccccaaaaaatgagttttgaaccctgagcgctatcggtcttcgtacccccactgcattagttataaaagcaccccagaggcggagatagcaacgcagacggtccgtacggagtagctagattatggaccatcattatcctccccaggacttctacagatactttgcgtaggattagaagttagaatcagtcgtttcgctctgcaacgactatctcgacggcctcagtattagacttctggcctagtgtgtatatttggaaaaggtgaatgtggctgtattgatgggtaacagcttcaagtaacagctacgatgttctcacaaacatagaatcacagagaaaggagttgtttattcgctagggaaagaagcagcatctcagtccttcatctcttcgtcctcaagttccagccgagccatttcctcaccctcaaattccaaccggatcatttcctcctcgtcccgggccaccgctgctctggcttccgccgccattactctgctttctgctgcctccatctctgcccgatgacgccgcattctggctgctaacagttgccgtcgtgctactctgctacccgggtttcgatacaactctgtgtgtgctgctgtcgcaggaggagttctagaacgaattggtggctgagtaagagtcggtggggaacgggatctggaccgagcagctggcggaggaagttgaacccgcgactgcaagtctgggaatggatttagtggagtcgataccacgctctgagcaaacgtccgaatggaagggtcatggccaagagaaccagagacactatcaacgtccatcatgttcgaaatcgaggtggcattgctggaagttgcagggcccgcttgttgctgagagtgaacaatgtgccgattgcccttggctgttagaagtcggagagtgccggcaaagaacttgttatgcttcgatcttctctcaatgttctgaatgacattctcaggccagaggcgcgcgtttcctacaacgacgatagctttctgagcccggctcaaagcgacattgagtctatgctggtcggcaatgaagcggacctcctcagcaacttcgctaggcttcgtcagcaggacaaccacgatgggcgcctcttggccctgcgccgcgtcgacagtcaaattatcgcgatataaacagccgcgctcggtctccgccaaagtggcggctacaaggttccgctgggctgtgtacgggctgatgatcatgacatcggacgggccaatttgctcgccttcggtggactggaaattgtacagattttccagcagagtctgcacggcttgtacctgcgccatgttcgaccacgatgtctcattcgccgggcggaaggcgacactgtccacggataggaacaagcgtcggctgccaggagcgacggtaggcatcgcatgcctggtccaagcatcccatgtccttcccactcgatccaagtggttgacgttgctgcctgaagcgagctttccactgtagattgccttgttgaacaactccaggatctgcggatgattccggtagttggtcacgagcgtctcctgggggtagcccgcttccatgagacgagacaggagggaccgcttcaggaactcggagccctcatttgcaccgtctgaaagaacagtcggaggcaactgccgggggtctccgatcagcacaatgacccgcattgattccattgtcattggaatcatactttctccctccatgctctgaccggcctcgtcagaaacattcacagatggtttgaagtctgaaaacttcaaacattcttgcgaggcatttgacagagttgttgctacgaccttgcttttagccaggaccgtacacacaatcttgccgtagaggctcttcagcttgatgacatcctggaggttgagtgggtggttatcactggtgtctcggtcacacagttcacgaagctcaacacactcaggatcattcggatgctcagcgatatggtcaaagaccagagagtgcatctggatcggttccatctcgagatccgactgacttatgatgggctgccgccgtagagtgggccgttgattctggctctcggctcggaccgccgacatgtggtatgatggcgtgcgaaagcgaacaacctgtccacaccaagatttcaggcgactatcccggttaagggcccggatcagagccagggtgaggttgtcaacgcctttgttagaggcagaagtgagtaacaccttgatctggagcgccatcatggcaagaactatggctaccgctgtggtcgtcttgcctgttccagggggaccatgaataaggcttacaccgaccgtgatggcggtagtagacttggtgaatgcctcttcttgtgttggatcgaggtggcagaagttccgaacatattggaggcgctctttggcaatttgggagggaagggaggagagcatctcgatggacaaaatgaagtagtcaggactggtaaagttaagctctgtgccatgtgcgaggatagtccgactaagtgagaatcccagtccatggttttcacccttgtcgccatatacgagcgttttggtacccgccgtagtcaatgccgcgatttgttgatcgattggaagggtatttggcttcgtggtcatcacaatctttcgctcactttcatcagtccagtcgaggtgaccatagtagtcaatgatgaaatcacctaacgtttcatcatcgacgactgtgcccttgtatcccttggccttgaaatcaccctcggtaacaggctcagctgctgatatctcgtctagcagtagaaagctgacggatgccattgctgtcagtgtcggaggccggccctcgcaattcaatttgacgtgaatgcggtgcctcataccgttgcctgatatggtagtgatgattgcgcggtgtcgagtgttcaggttgaacacactggttaccaaatcacgcgcaaaagccctctcaacgtagctggcttgaaccagtctgctctgccgatcgtggtcgttgaggaagtagggcccagggagttgccacacgatggaaggcttgactccgcttggatcctcaagccactttggcactactcgcggctcttgattggccggatgtttccggtagaaccagaaagcctgtgggggggcgagcgttgcgggatcaatgcttccatacggacgacgaagaaggctgttgagagtgacgggatcggtgtcgccaaatggcaggcgaagcaaatactccagcccagacattaacttccaccccttggaaaggaatctccaagctgggtcactccactgaccccagagaatcaagttgtcctggacaccaagaagcctttcccagtcctgaagagtagaagggctagcattctccggtgggaagccgatgacgactggcggcctgcgcatgtggactttgacaaggtatgccgtatcccaaactcgttttccatctgcgaagattcgcggcaaggaagctcgatactgacggaatgtttcagcatcgtccagttcaattccttcgcgggcaaagtggaagtcgcaatcctccgcggtaaagatcagaagcccgttgacacgtttgccaatgcagatctcgagtctgggctgctgtgattctagcactaggcgggacttcacgttgacgaagctatccccgaatgagatcacgctaggcttccattgtcgcaactcgttatcaccctgggtatcgtgacccataggctggtcaaatcctcgtgcaaatgcgttgaaatccattgctggtgattgtcaagaccctatgagagtagactatgttagccagttgatcgtgagtaaacgagcgaggagcacggaaaacagactgacctcgtcagaggatcagtgaagaggagcgaggagaggagcacagaaaacagactgacctcgtcagaggatcagtgaagaggagcgaggagagcagcacagaaaatagactgcccttgtcagaggatcaatcagtagtggaaaaatagaggagatggaggaaaattctctgcaggcaaatggttctgggagaatgtggagggtgaagatgtgaggaagataatgttgggaaaatcactcttgggatgggggtatgactacctaccttctacacgtgtctaggcacgtgaatatctcagcaattcgttaatcgatggatagctatgaggtgctcccattaccaacagactcacctgcatcaaagtgaacagatggcatggccaacgaacggctcaccaagaatgaaacaacaagcgaagacgtttcacgatatctctctaatgcagttctaggtaccttgtggccacatttccggaaagttgacttgggagatactgttctggattgcgagttgtcacgagaaaaactccatgaaaagccggtaagcagtaatcaatggatactaattcatgatatagatggatcaactatggcataggattttcctcagtcggcccattcttgcacatggtacggagcttgataaccagtcctagccatttcgttctgtcaatcaagccactcccctcgattctctcccacgttgccaaacagcgcctccaatatgtccgggacttcgattcaaaccaacaagatgatgcatttacaaagttggtcaataaagcgattcacaacggtcggcacactccaagcagcgcgaactagagcgagtcggaaaaacatgggatacttggaccaggagtaaaacatggaggtcgaggtattttcccctgtccacatcggcacctggcgctggcagtgaggttcaatggtcatcagcctcggttcattgcaaacaaagagagactgaacttctctttgagtctcgtcattgttcgcagcatgcctttagcccgagcatgtgatcaagaatatcgagggaagattgaattgcatcaagcctaattgtgtcgttctccgattgatcgcggccaagggcaatcgccaaattgttcactctcagttgcaagcgcccccggcaacctcgagcatttcctcatatttctgagctgatggacgctatcctacagttaggacagtggggattcgaccaatgacccagaagtttcaacccgttcgttcagagaatggtattgagcccaccaactcgcacccggtcgtcaattcgatctaaaactcgtacgagaacagcacacgcggagttgtatcgaaatccgcatagcagagaagcagaacgtcaactgttagtagttagaatggagcagagacggaggcagctaaagccagatcagtggctgcccggtatgaggagaaaatcagctggaactagaggacatggatcttgcagccaggacaattctttttcgcgtgcgataccatgttaatgaaaagatcatgtcacttttcctctgtcgttgaagctgttaccaatcaatgcagttacgttggttttctcacactagaccagaagtagaagtgggccttccggcagcaattttatacccggcccttgccaagtgctcctcgctcaacttacaatcacaggttgtcccccaaaggtggcaatattagatgtagacgatagcgttctgtgatagatcacatgctatgaaatatgaaagaaatcagggaatgtttgttgaattttagcgtcgagttttattttgcccctagttattctatgtacataaacctttcaaaatatagcgagtgaccttagaaggtgactatgcttagtcgggtagacgcgtcaagcggtgacgttgctccagaagtggtccagccttaggactaagagaatatcagctaaccccgcatgactcgcctgaagtcgtcattaatttttatctttctagatagtggcgatttcagtcgatccttcttcggatctcctccgtagaacgataagtggcattcaagcatagaagctcggccatttgttggtcgatggaatcaacggactaccaggtgtttacaaaagctgtacaagcatgacaaaataggtcagacatgtaacactgatatgatatattcttttgtttgctgtggttttgaatgccttcgagtgtcttttaagtgtcttatttgagctcctttttgagtgccttagtttatgtctttctattcctatttcttggtatagcactttagtcagaaaagggcgaaatgataacgctgcccaggtgtgatattcccacaccgtacggtcaagactgacgagccgtgccgacaaagttaaatgagcccggtcttggcgtcttggcgtcttggcagatgagaatgacatgctcttattgtgcaactgtcgggtatacgatgtatcacacaagtactttgtgcgaatggccttgttaccttctataaactcgtacctagcacagcttcttactgtagataatgtgcaacttaatctcaccttctccgacgatcatataaatgccatcgccaatcacaatggcgtgcttcacgcaattccccacacaattgcgcgatatcccctcatttaaggtgagtagggagtagttatacctcgagctttaatatttatatcatgcacctcgcacaattagcttctaatcacttgcattctgcaacctggttcgcctccttatacgagctagatcgcgcctaaggattttcaccctgaaagctcgctatggaagctatcaatgcatcggacgagaagactatggagctctcaaaggatttagaccttgaggccaacacacgattagaatacgacccatggcttctcgacgaccatcccctacgatcgtacccgacagagtgcatcccaggcctgtcactttacctcgacgaatactacgagtccattggaaagcgaagggcgcttctttttcgcgcgggatgccttatcctcggatgcctgtgagtgtttctgtcccatctctgctagacagccaatctgacacattcctccccagagtcgcattccaatgtctccgatggctcccaatccatatcacacgcacgggcccacaccacgcgcaccttcacccccagagtggcgcgtgtacatttccgacgctagacacgcgaccgcaggccctcgagtcgtcgttcaacgagggatgcgatggcctccggacggcggtctggatgcacaacggggagctgcagattggagacgccggtgtggagactgagcacgagcacgtcctgcagagactcggtctcgaccctcttatggagaaagttgctgagaacgatgccaccgcccgggcatccgttgatcctgggatgtcaggcagctttcatcctggtcgggctcggactttctttttggtgcttgaggctaggacctcgcttgacgaattgtacccgcgtctcgttgagcaactcgatactctccggcagagggggtatttgtcccattgggatgggcagaatgttgttccgcgccatttgactgtggtggttacgggggaggcattctctgggagtgactgtgtgcatcattcttattctgacgtgttctggtctttaccgggaccgtttatgattactaaggatggcctccatctctcgccggtatgtgtatagtagcgtaaccgttgttgactgtgatacccaatttgagtttaatttgatgtgcatgatatcattatatcatttccaggattgattatgtgctttaactgtgtacacatctatatctccactgcaaacagcgcaagatcacagcacagaggtccactttagcatcttctcagatctggatctaattcgattagagtaaatacctcacggctctaaatgaagcataaatacgtgcatagaaatggaactcccctttatccatcggctttgctccgtccaggtcccacccagaagaacaataccggtggtccacgtggggcctttcatttcctcatcgggactagcgggctcttctatggaaaattacagttttctttttgtatttcgcgtcttcgtctcgctttttaaatatccccagtctatacgccgtgtagaatttcaaatctacttaaaaaggagaaaataagtcgcaaaatgataaaagtagtcgctatctgccttcaaaatcaagaaatagattttattttctatttttaggtgcatgttattcctcgtcaccaaccggtttattaccggtttatcaccgacccggtagttaattgacgcatttcgatcggtgcagcgggtaattggcgcaggtaatctattcttttcgagacaagcgggaacatcgtcaaaaacaagcccgctaatccttgcccgttgtgttgtttttctcggtgggacctgtacctcgatggggctcccgtgggatgccggtgaggatccagcaagatgatccacggaaaagcaggaaacccgagatttgaagagttcacatccacagttgggtaccaattggccacccgattggacaagataaagaaaaaaaacaacgcacaacatggagaacccccccgagggaataaatacaatataccagcaggccctaagaacggcaatgccagcggttatcacgacgggcagacttgatatcgtcgacggtgcaacgagccaggcgtgtgcaggattcgcatggaccaggacaggtgccgaagcaccttattgacgaggttatcatatcctgaaactatgatccaccttgtacgccaattgaggagttcaatgaagatcctcgtggcgtaatgggggtggaaattgtcccttttgttcggtcatttcttcttcttcactctttttttttctctacttcgttccgttcgtctgacacctttcccacgttaacattgccgatcgtgcgggtcgaatcagagtcattatgagtgggggtcgtccgagggcgagagtaagtcggagcagaactatcagctaagaaaccaccatctaacaccgttccagtccgatgctctgccacagtcaccgaaccgcaaccgagccgccagcgatgcagattatacctcacctaggagaactacctcacccaggagaactacctcacctcggagaacttccgctgaggatggcggcgttcctcggcgattcaactcgaatacctcgacgacacaaagtaatggtagtgcactacccagtttgatcccgcgcaccacgcttgcgcagcgcacccagggcaaattcaccctcgctgggccggatggaaccccccagctgcgtctggcgcaggaacccttcgtccagccgggctacgcggatctcaatccatcctatgaacaggcctccaacgccagaccggtctggtcgctggccaaaccgttgccccgtgtggtgcggccgagtatggtgccgaccaaagatgagctcttgcagaacatggcgaatgcccagcggcccacggagaactcggataggttggggctggacgtggacccgaacgatgtcgagcagggtcgcattgataagacgtccgatccgcggaagatggctgcccaggtgaaggacgctcggttgcagcgtgagaatacctttatgagtaagattctcagtggggatggcggcagctccatgagacagacttcgcgcatgtcgcgttcgtcctcgatcccggggagacgtacctcgacatgggatatgccgccgccggatcaacaactgcccactgtagaagagggtgatcatccagccgaagatgaacatgaacaagaagagcggccgatgtccgctgacgagcagttccagaataatcaagacatgggtgcgcgattggacgaactcttatcgcttcccgaaatggaaaaggggaattaccccgaagacctgcatccgcttgtccaggaactggtcgaagacgaagtgcacaacaaccacaccacttggtccgtcgtccgtacacaccaccgcgaggctctcgccgagggcctgggtgtgtttgtttcgctcaccatgggcttcgccatcgacgtgtccgtcacagtcgccggccagggtaaccccaacacaaccgcctgggcctggggcttcgcaaccatgatcggcatttacatttccggtggtgtctccggtgcccatctcaacccagtcgtgaccatggtattgtggttcttccgtggtttccccgcccgcaaaatgcccgagtacttagccgcgcaattcatagccgccttttgcgcgggtctcgtcgcgtacggaatctactacgaatccatccagaactacctcctcaccaacgccgacaccggaatcatcaacagctttgtgacgaatccgcgagagtcgtgggtgagtcataccacagcgttcttcaccgagttcgtcgggaccagctttctaatcgtcaccattctggcgctgggtgatgaccagaacgctccccccggtgccggtatgaactcgctgatcgtcggcttggtcattacgtccctcctcatgtgtttcgcctaccagaccggcgcggcgttcaacccgagccgtgactttggtccgcggcttgcgctgctcgctttcggctacccgaactcgatgttcacggacccttactggttctatgggccgtgggtggggtgtgtcggaggtgggtttttcggtgcgttcctatacgacttcttcatcttcaccggtggtgaatctcccgtcaactacccgcttgagcgcacccagcgcgctttgacgaagagtgcaatgaggtggaggcgccgactgcgattgaaaccgaaacagtgagactgtccggtcgagtgtggaatattgtgtttttctatggcgtttgagcggtcactgtttttctccctgcattttgtaccagtatgtccggttaaagaggctaaacatatatcaaataatacccaaggcctagtggaataggatgtttttttcgcatttcatgtctgagcagggtcatcctggcgttttcctgcatatgcaagtttccggataacaaggaacaggtaatacaagacacaaactggtttgcagaataggcatgcaggttgggcatccgaatgaaaatagaactcgatttacttacatcattgagttattttaggtttgtcccttcctggggcccgtgacccggcttagtaatctggatggaccgtgggtcttccaaattggtatccaattcacgtgaatatctcgtctgttaaggttaagcatttgtgtcggtacctaggacactgccaaaccaagttctaacatcatgcctcaatcccgaggtactataactgatgtcggagtcccgcgctcaacctcgccccgcgcgcgaaggccactgcatgagcctactccctcgtaggggtctagggcgcaagcggctcattcctagtgagcccctttctttcaagagggcagctcgatcttccagatacgctttgtatgccggtttcgggatagtcttatctttgtcctcccatacttcatatctgacttcatcctatacttgaagttggcgagtaaattttgcgcttggtctaacgcttcgttttgatttcacaaattcagacgcatcaattggcgggatacgcagtttgcgcataggataggcgatgatgatcgttggcgagtgtgagatgctaaggtcatagtgaaccaggatcgtctctggcttgtcgtctgttacgggcttattatcaatagataacgaggacaacgaagaaggagcaggtgatgcaagtttgtcgatgaagtcgcaggtattactcatatgaataaagagatcttgcgttgatgagtctatagcctggatccatttatgatgatgcgctgcaactgtccttcttgacacccccgccttccccatcgggcatcagaaatagagatgattactttgacacgattcttcacatgtatttcggtgttccatgatgactcgagattgtgaaattgatggattgggcccgcctatagtttccttagtcatcagaacgtgccacctgaccctgtttatcgacgtttatgaatttacctggatctatataatcgaacatgggcttgagtaactatgtatgcaagttgtaactccagttctcggtttttcccactgagtagcctcttgatgctacttttagaagaaacactaccgctagcctgagtcggttcggtggcttaggtgcacttagtcatgactacctcatgagtctatggtggtgcacgcagcaccaggggtctaatgttactccatgttgctcaagaggttatccttgttatctttgtcgttaagaggctcattgtagctagttaatagaatcgatagacgtgggggcacttaactaccccatacaatagttattgtatacctaaaataaatagagggtctctaatatatatttgacacgttaagctctttatagggctagtatacattgggagcgcgttgggcttcttggcaagaacatacagaacaactagattattccagatatttaagcatcgagccaaatcctctaattatgtatttatatacgtgtatacaagatatatgtttaatgcaacacttccccccttttcccctctcatataggtgcatatgtaccctgccacacatctatgtcgatgtacacaatccccgcatgcaagattaggtcttggcccgaaggcccatcgcgctaaagaccaccgtcatcgctcaccgttttttctccgtttccccccatcaacttcggaagaaatttcaaaagtggattattctattttgattgtatttgtttgttgattgttgacacatttccgcccaaacgcctatttctgcacgttcccattgtcttgtgctatctcccgggtcgcgcgatcaaccgctgatcctgcagctctggcccatttccattttctcttttcttctgcatttcactattccaccgccattccactttcttatactttttgtccctcgatcttaatctagtcctccatcacattttgaacatggactatcgacgactacaacactcatacccgccacggccctcgcctttgggggcctcgcaagaacctcgcgatccacacttcaccgcgccttcgaccgagtctcgtcaagagattgacaagtctcgcccgtacccttcccccgcttcaaacgctacgtcctctccgtcacagctctaccagtcagcgacttcccatacatcgaatacccctcgtggagatacttccagcgcatactttccgaggaatggcccaacacaagcacaccgtcgacatgggagtctcgagacaaggaatcatgaacaaatgcatcgcaggaataattcgcaacctcaggctgctcgttatcgtgaaggtaggcaatctgtttggttttgtttttactttccctctgctcggatcccccagattgaggattccaaggatcggacttgtgccgtggttggtccgtcctccgcagccccgtttctgagtatgggcgaccgggggaatagtttccgtaatctcctgattcagatgctcaaaaccacgcgacacatcaaaactcattctccaaatcctccccctcttcccttgcccagacaccctgcccctgatggattttccccggtggcgcagatcgactggacgacagctcgggaacgctagtccaggtcgggtctagtgcacacagaggagcccctgcccctttcggactagcgtaggagcttccggagtcacgggttctcctcgctctggcccttgctttctctttgaaccattgctcactcattcacagggctcttaggtgcctccattatgaataatacgccatcacaacacgaaccagcgcgtctaaattcccaggggaacagtggaaatcctggatttcctggtaagcacccgactgaggcccgagagccgtgcaaccgtccttgtcgcgatacatgcatttcgtcacttatgcgaccgggacatgcgcggtcatcttgaattgactcgctgtatcaagggatatttggctaactcgaacccgtctgataggtccgaacgaacagcccgcaccatccgcgtttggaaatcgccaaatgccgcctccttcacccccacattcatattccgcgcgaccccaatcaacccacgcgcctgtgggctctttgatggcgcgcgatgtacctagcagtcaggcgctccgaccgggcagtagcatgtcgatttccgctatgttaggctcggacccagatcggtctgcgcgggaacctgcacgagaatctgcgccgttcttttcgcgaccacctgcatcgtcgatattcagtaacgcaccatcgtcatcttccgccgccatgtccccacccaacgccccaacaagaccatcaccgctcgaaaactctttcttccgtcgttcgaatacaccagagaagccattctccaagcctcaaggcgcccgtacctaccgatctgggtctggtgggggttcaactgtgggcggagagcagtcggtgttcgggggcttgacgcgctcatcgctctcacagtatcccgagaagccacactcgacgcacccttcacctagaatctccacggcagagccaccgtacaacgaacctcgtcgcatgagtctcaacggtccgatcactcggcccagtagtcagccaccccatgcagacgcacccacacggcccccgggctacagtccgatttcccagcccggaggggtcgcggatcgtcctttcgagtccggccctcggcctgcatctgggtcgtacgggagtcatgatccacagcatggtcggtttgcaaacatatttggcgagcggcgctcggaggatactgcacagcgagagcgagaacgcgctccagcgcatggatcagacgccaagttgacccagcctggatcataccggtatggctcccactacggcgaacgtgactcgctcgatcgtcaccagaacggctctacatgggacctcggtcgctctcaccctccgtcgccggagagtaagcgcttccctgcccccgagcccgggtcgagtttcgggtttggggccattcaaagctacactaaatcactggggtcgcaaccgggcggcagacaacctcgcctcacgcttcagtctctaaacagtcaaccaactcctccgccgcctcatgatccgtatctcaggcaccaagggcagcctccacgaatatcatcaacacctgctatcaccacatccacagctgccgcgtcatcgggtttagccgccctggctgatgagggacgccgcaaaggaagtgatgagctgctccatcatcgcagcctactggccgttggcgttgatgggaaacgcggtggccgtgcatcgccgcttccccaggctgtacaaggcgctcaagctccatacattggtcccgctggagagccagcgatcaagaatgaactagggcgagtcttctccggtattggcagcggcgtgggtggcgtcaccgcgactactggtggcagcgggccatcgacaccattaggctctagtcctttcaagcgcgatagcctcacgggccgctcaatgaatggagaagggatggatgaggcgtctaagcttgctcgaccatcctctgcagccggcagacggtcgaaaaagtcgcgcgacgaggagcagatggaaattgagtctaatgatgcccgaggcgtactatcagcacgtaacgcccgtcgttctcggcattcccaccaccatcaccatcagtatgttctacccaatcaatacagttgtcgtatgctaatattcctctagccatcaccaccatcgccacaaggcagacgaagaggcggctaccctgagctcccttcaacgttctagcttcttccatcgaacatccccagcggagtctcctgccgcacaccatcaccacccacattatcaccatcatcaccatcatgttcctcgactcactattccggttacatctcctatccgtgagcctcgtactaccgtgaacctggaaccgttgctttcgagtgtggcccatcttcctcggcaccaccttggctcaacgctatacacgccacgcatcagtacccccaccgccaagtcgtctttagatagctccaagtttggatatacatcgaccccccagccccttccccgcttcgaacagcgagagaattgcacatttaccgttcgagtcccccgtttccgaatcaatcaatctcaccgagaggaaatctgcgcccgacgcgcgctctgggggactggtgtttatacagacgactccgaccctgtcgccgctgccatccactccggcttcattcgcggtgcgtggggcgacgacgtggacgagtcaatgcttgatctcgagattagagatacctaccagcacgcaccgccacccgaaaccacccctgagggcgaggctccggccaagggcccacgtctaccaccgatacccccaaccgacaaggacctgcacatcaccctactaattcttccccgcctggcccagtacgacagcactctcatgttcgggctgaagtcccgcaaatgggacggtcgtcacgatggcatgagcttcaagatccatgccgtggactgggtggacgagggcgttgctcgtggcgaagagcgcagcggcgaggcccgtcggaaacgtctccgcacgcttatgcagaccggtcggatctgcaccgggcctgccatggctaaaatggatgagctacgtcgtagcggggtgcaggtacctcgcgccatcgatggccaggatcaaccggcagctgtgcagcccgtctcctaattgcgcaccacgtattggctgaatgacttttgactttttatttccttttccccgtggagcctagtcggtgttctgggtattccaaggtgttggctatttttcttgtcattttcctcttcgattttgttttgttttattggccgggtcaacgggatcggatgaaagggggtttccttgatttattcttcccatctatacataatctagcgctttatttctttcttactgcaatgcgcctgtcatatactccatatatcgtattccgtacctttacgctaaaagctctccccgcattggaggggatctcccggagaaccggagtattaaagtcggggcattttatattttgtgtatgttttatatgttgtataactatcttttatacaatcccttccattcaacactatattagtgcccttcacattctacatatttctccagtgccccagctctcccttgtgactgtaactggggaaatggaccgaggctcgtgggtggagcaggtattggtattaccgtattatatcctttgccccaggttcagatgcatatacaagtccatagtcaacacgataataagagccaatattgaagataaaagacatcaagaaaccaattatccagatctccaattcacaattcacctcttcaccttctcatcgttccccgtggcaaagaaatccaagtcgatcgggactgaggtcatgtatttccccagtccccgtaccgcgttttaccggcttccccgccagccgaggtttctgctttaagcgtcattcggccattctttttattctcccttaagcttcacctggacgtccactcctccgaatacccccaaacgaacctttcagtcaaccagagggatgttcactgcttctgcccgaagccgtctttctaacctgtcaaggcaacgcgttccgaacactctgctcgcccgctcggtaagtcggttacatatgctgtggaatgctgcggaaagcagtgaaatcgcccgggatcaacccattgacacgcatatagactctcaaaatggctccccgacgagcagcatcttccgtccctgagggttagtaacacagacgtccggcgcgacgtgggcacaccggatcaaacgctgacagaacagcaggatacaaggaggacctctccaagggcaagatgcttcgtttcgaagactccctccccagactccccgttccctccctagaagagaccagccgtcgatacctcaagtccgtccacgctgtcgtctccgagtccgagtatgagcgcaccaagaacgccgtggaggaattcgtccgccccggtggtcagggtgagtctctgcagaagcgtcttttggctcgtgctgccgacccgaagatcaagaactggctctccgaatggtggaaccaggccgcctacctcgcttaccgcgaccccgtcatcccttacgtctcctacttctactcctaccgggacgaccgcgagcgtcgcaacccagccaagcgcgctgctgccatcaccactgccgcgctcgagttcaagtcgcaggtcgatgatggctctctggagcccgagtacctccgcaaggagcctcaagccatgagctcgtaccagtacatgttcaactgctgccgtatcccctccgagggcgcggatttcgctcgcaagtatcccgcttctgagaaccagcacatcgtcgtggtgcgcaagaaccagtatttcaagctcccggttgttgtggacggtcaacagctcaacgtctctgagttggagaagcagttccagcgcatctacgacaccgcacagcccgcgccccctgttggcgtgctgactgttgcggaccgtgatcactggaccgctgctcgtaagaccctcgttgctcttgaccctgccaatgagctggccttgcaggatattgagtctgctggcttcgtggtctgcttggatgatgcgcgccctgtcactctgactgagcgctgctcacagtactggcacggtgatggctccaaccgctggttcgacaagcctctgcagttcattatcaacgacaatggcactgctggtttcatgggcgagcacagcatgatggacggcactcccacccaccgcttgaacgattacgtcaacaacgtcatcttcaacaagaagatcgacctttccgccaagaccgtgcgctcgcagcttgccgaccccaaacccatcgacttcaagctggacgacgccgccaacgaggctatcgacttcgcaacccagtaccaccgcaagcagatcggctcccacgagctggttgtccaggcctaccagggctacggcaagggtctgatcaagaagttcaagtgcagccccgatgccttcgtccagatgaccatccagctggcctacttcaagatgtacggcaagaaccgtcccacctacgagtccgcctccacccgcaagttcgccgaaggccgcacagagaccacccgcaccgtctccgacgagagcgtcgccttctgcaaggctcacgaggacagcaccacccctcgcgaggagatcgtcaagctcttccgcgctgccctcgcccagcacaccaagtacacccaggaggctagcgccggccacggtgtcgaccgtcacctgttcggtctgaagaagcttctccagcccggcgagaagctgcccgagatctaccaggaccccgcatacacctactcttcctcttggtacctctccacctcccagctgagctccgaatacttcaacggatacggatggagccaggttattgacgatggtttcggaattgcctacatgatcaacgagaacaggtaagcactagcaccccgaccctttttcattcatgcatatctaactaatctctccagcctcaacttcaacatcgtctgcaagcgtcttggcgccgaccgcatgagccactacctcagtgaagctgccactgagcttcgtgacttgctcatgcccgacttggctgcccagcctgagaagccgaagctgtagatgtgtcttgcatatacccggtttttattacttttggtgcttttggatttatgtttccttactccagcgcctgatagatgaatatatatttttcaacttggaatgtctgtacggagtatttacacttgttattgtacacaaagtttgacttgatctttaccttcttttatttgaattgatatatttattcttcgtatacatttttctattctagaatctatcagaacgatagtatttctttccccaggtattagctagcattagttcgtttagaccaatgaaacccacctttgtgatgtacgatcatatgtcctaagtcatatctcaacgtagttctatatgtcaagagattccgaatatcctcaaatatcaaagtccacgcaactccgagagcttcgcaggagccacccacatcggggaattaaagccgtctacgactccaccacgacattcctctccaatcactgcaccaccactctatgaatcagtcctttttcgtcgtttctagcccaaaagagccagaaataatgtcggtgatacgaccacggcccgacgctatagcaccgttacgcgtccatggcgtctctactatcaaaaccaacgcccacctcaatccatcccttagtcttgctctcctcaacagagatacatgtactccgtacatacatacccattgaacaatgcggtacacagagaaatgcctctgggccctgtccctatccctaactctctgttccccatcgcaagcattcaccctcgataatatcaacacaacagccaacgcaaaccacatcttcaactcaatccagtcaaccctccgccactatgaatcatccatctacccaaatggcatgtccttcttcatagccaccgtcgaaaagggaacacgcttctaccacggcaccgggacaccagatcctatcgtcggcgtcgaatggctagcctttaaaccgcagcattcgcttggtttcgcgcatcgtgcacacggtcagaagggattcatgcacaagaatgatgagcatgaccatcatcgaaaccaagatagagatctagatcaaggtcaaggtcaagatcaagatcaagctcctctgggaaatccccctgtccatccccacggaaacacaaacacaaacgcaaacacagaccccgtcaacgcgggctacctccacacctacgccgccgcaaaagacctccgtctcctctacatagacggcatgtccgctggcccaggcggcgccctcgagtcccaggaccgcatcctcttcaacgacaccatttcccatccggagcccggcccgcgtccgcctgtcggtggtccgccggaggagaaggagcgcgcgttccagacttgtcggatggtgaaggaggtttggggggagagggttgatggtattgctcgtaccgagggcgattttgagattattctttgttcgtttgagcgcgatcttgaggttgtggctattacgcagacgaagcctcaggttggtggtggtggacctggtggtggtcctggcggccctggcggccccggtggtccaggtggtcctggtggtgggagggggaggaagggtgggaggaagggtcccggtggtcctcatggccctggtggccccggtggtcctcgtgggcggccacagggtggtgattgttgctcgatcgatgcgcggtatgatcggttacttgggcagaaagtccgtttggatttcgatcactttgtcacggcgtatgggtacgaccttgatcttttccctggggattcgaaaattccgttgctggatcatattcccagtgaggagtttgagcctgttcgatcggacatcaatgagatggttaacactcttcggccggttgactctccctttgattggcaggctgttgctgatatgattgttttccggtactcggatgaactgcggactctggcagctggcaatttctcgtcggttgatgtccttcggacgaggattgagggtgttttggagccttttattgattatagggactttggggccagggaggatattgttgggttgtgtcagaatgagtttattcctgcttctgctcctgctgagtctcttgctggccaggttgtgtcttccatctctcgggaggtctgtgatactttggcatcagggctgttggatgggaaggatttggatgagactgtggagagtttcaagcagcttgtttcgttcttgggctggactacgtggaagtaaggatgggtcgctattcgagtgagactgttatttttagactcggatagtaatgccaattaggtcttgtgcaagggattaccttggataattgaagtcgtttattgcgttgacgcagttcaacttctgagtatttacgtataacgcaaagaatgaagtcgacatgtattgtcatggatttctatattaatttcagtttcccatagacctcgccacttccaatgggaagttttgctagcgacagcaacaggccatgaacttcatacaaaacactgtcagaactgcaacattgacaagcgcatagagtcacatcgccacgaaagaaatgggaaccgtcctcgaaagatgggatatactgaccctcatgaaaatctaggcgccaagattgaaaaatcgaaaccggttgcttgcgggaggattgcctgtggttattctgtggtattgcatagagtattgaacaattaggctgatgtccgggttctcgcctgtatcactcatatcacccctgtgcgggtcaacgagctacgactcgtgatgaatgcacttttcagtctttaccgtctcgcgttgtactcacggcaggcggggccgggggtttggtccccgcctgccccgacgcaaannnnnnnnnngggggcggcccggttttcccgccccccgctccccccgacgcaaaccccgaagctgttgttgcggaggcggaggacgcaccgtgggaagtcgtcaggccaccgatttgcctctctgtggagaaaattagtacggagtatatgtatggagtacgcgcttaaatcagatccactctcggggtggggttactccgaattactgtgggctcaagaaaaaaaaaacgctaaaccggaattctcttacctagttctcggatgcgttgccgaaggaggacgttttctcgggctagagagctcgcttcggcctggtaaaatgcaccctcgtcccggctaccgcgccgagatgcactatcccgcaaccccggaaatggctccacgctttctccgcgcgagtctagcggtcgcaagttcggtgacgccgcttgactgggaggccgcgagcttcggcggtttgatgaagaagagatcgataatctattgccgacaggaggtgtcgggccgggtgggaagaaggccgatcgttccgatgccggagttgtgtcgtcgattgcagcggtggattgtgggttatgttgctgctggtattgatgcaattgggcctgctggctgcggatcatcagaagaagccggttctacatttcatagttactcggttagcttcctacaaggctaaaagggatgattgacctaccacttgtgcttcttgttcttgctccagctcttggtgtagctcccccagcgatggtgcacgctggtgatgaggatctgctgtcgcaaagatgggacttgacgggctggctgtgcggaatgcatgtccgatcgggctgcgatggtcacggtggtctaacgcgggtaactcgctgctaggtcccggactagtacccagcatctcgttcacgttcgaattaataccggcagtggatcgacgttcagataccgatagtcggcctatgcttgagccacgggatggccttggtgagacagtgttcgggttcacgggcaccggaccagttccaggagcggccatattacgttgcgggatggaggaggaggttgaagaggaacgggatggaggaagggaattcagatccggtgacatctttgattgataactgcgttgacgtcgaggaatatgtatgatgcgaagctctaatctgtagtaacgtcagataatcccgtgaggatctgctgactcagccaccgctttcgcggggtcggtcatgtgacacggatgccgtttatggaaaccgacgccagaggctgaatggctagaatgctccagcctgtctctacaagacccagtctgacagtattacaccccgagtgaatatggtacaactcggattctttctctcggggcttatatgattcttccggaatatggaccaggccagactttccacgggtacgaaggtcacggcacagcaaatcatatcttggcccctggttgcgcgcaggccaaggagaggaacacgccggtttctctatgtggcgctcaaatttacaatttctaagagtcatacttctataccgacatgtaaaacaaaatccggggatggccgcaaagatcttcagtgtcgcgtggcgctccagatacgatcgacaaaaagcacgagagtccgggtccgggggatgtgggatggactgtggttgtttccggataacgtacattccgtacattcccccttgaatgtgactagcaaaaccttctttttgcttttaccccagtgggcaatggcgggtatcggtaatcatggggaaatgtcctccgagtgaacgattctgcaagggggagatcaggccatctgctggtaatgcggttatggttgtggttgtggttgtggttgactcgttgactggctgacaagtacgtaattggcggccttccactcgttattctggaacgtaaagccgaaagatgaccgaagagcaagttccctcctttgcagatcgaaggatttgataacccgacagacaaagaaaaaaaaaatttcaatcctccgtactcagccgattacaatgtaagcgaagggcgtgctctggtcagaacaagagttatggctgccaagccctgatgacgatctaacgccacgcccgtaatatgaaccacagcgactctagtgcatttagccgcagtgcctgtcctggatatgattgacgaatgacctgatctcttgtggttaacctgacgtcacatatgggcaaggcaagtcatgggcgacttggcaatatcttgttttaacaggaacacgttgagtttggagggagcaatgggcgtttttttcttccccacagcgtttttttgtttttttagccccttttgtcattttttgtacccgagtccactccgtaccacgcagaacttcagtcgcatatggagaaccatgcggccgggcacggtcggcaataaccccggctccttgcttcgcggggcacatggggtttgatatcccgatcgtcggtatacttgggtgtagatttgacgtggcatgtaagaagatattggacagactcgaagcggacattctctcggcccagaacggcaaacggggaagtcgactggacatgaccgtagttgtctccaatgtgggtccgattaccccaatgagagggttcctattccggctaattagccctggaagtaccagaaagcatcgaatccttttcacccatgggctgtatattgaaggcaattccgtagacgacaaagcgtccaaagaggcaaaaaagggacagaggaaaggggcaaaaggaaacggatctgaagagtctggagagaagattcgaagtctggagaaaataaagtggggtaccacgggggacatcggcatcccgtgagtgtatagtcagtaccaagtactccgtacctcaggtacattggtaataaatccaggattcattccactgaggcaaaagtattcaatcacggaacatgcgacctggaaacttttgtaccgacctcgtactaacccggtactggaaatgtactgacagggccagcccgggggaccgttttggttctttcctgcatttggctcttgcctttttctccccgtttctgtatttaattcctccttttcctcttccttttgatcttcactctctatctctttctctccattgatctttctccagactgcttgagacttctccacactttcttgtctcatttcctggggtttcttctactatcaactggtcttgataccagtttaccctatactaccccatctctacacaaagtgagagtcaacaatgacgaataacgccgacaagtacgggagggacaccgtgcaggcagcagaagctgcccacgcccaagccgttgtcaatgccgctacggaaaagttggaagacgatcagctcgaggaggcctcgcccacacccgatgaggttatcgagctcaccgaggacatgtgctacgacaaactgggatactcctttactgaaagaaagaagtggatcatcattgccgtgatcttcctcgttcagacatccatgaacttcaatacatcgctctattcgaacgccgccactggaatctcagaggagttcggtgtctccatgcaagctgcccgttgtggtgccatgatcttcttggttctttatgcttttggctgtgaactctgggccccctggagtgaggagctgggtcgcaagcccattctccaggcatctctcttctttgtcaacatctttcagctccccgtggctctggcccccaacttcgcctccatcatggtcggtcgtgccctcggcggtctctcgtccgctggtggctcggttaccctgggaatgattgctgatctgtgggaacccgatgatcaacaatacgccgtggccgccgtcgtcttctcgtccgttggcggatctgtgcttggtccagtggtgggtggcttcgtcgaggcgttcctaccgtggcggtggaatatctggattcagttgatcttcggtggtttcgtccaagtggcccacttcctgttcgtcccggaaaccagaactactgtcatgatggatcggattgccaagaacatgcgcaagtccggcgaaaaccccaacatttacggtcctaccgagggcatgtcgttccgccagcgtttcccgccccgtgaaattttggctacctggattcgtcccttcaagatgttcctgactgagcccattgtattggtgctttctctgctgagtggtttcagcgatgcccttatcttcatgttcatccaatcgctctctcttgtgtacggccagtggggcttcaacacctgggagaagggtctggccttcatcccaattttggttggctacttcatcgcttggttctccttcttcccggtcatcacacgcaacgtcaaagagcgccgcgaccatcccgagagcgaacgggcacagtatgagtctcgtctgtggtggctgctttacaccgtcccctgtctaccaatcggtctgatcggattcgcttggaccagtttgcctcagtgccactggattggatcgatgatcttcgctgccatcattggtattgccaattatgctatttatatggccacaattgactacatgatctgcgcctacggaccatactctgcctctgcaaccggtggtaatggttggtcgcgtgacttccttgctggtgttctcaccattccggccacgccgttcttcacgagtaagttgccacattccacacatttcgcattatcatactgacaatttttgacagatatcggtggcgagcgccatcttgaatacgcctcgactattctctgtatgtctatcctttcctgtctcttcgcatgagccagtggtctaacctgttcctagtctgtatctccgtaccacttgtcgttgcggtctatatcatctactggaagggcccgacattgcgcaagcgctctccattcgcccagcagctagaggatgctcgacaccaaatgcaggtgcagagccgacgagggtccaagatccctccggcatcacgcgccagttcttatgctcgctctcaacaagatcttcgcatccgcccaacaatgggtagccgaggcaactcccgggtcaattctcaagtgaattcccgtgccaactctcgcgccaattcgcgccgcaacagcatcaacctcaattcttgatcgctgttcgtttttgttttgctttctgctgtgaatactcatacaatgggagtgagattactgtcataggaatctatgagaattttcacatcccctcttcgtgcatgcgccaatcctacgctgtgcgtggctggcactaattcttgcacccgacgctcagtggatatcccactcctggtctgtggctttttgttcttgtgcacttcaattatgatgggaattggactggaaggaggaaagggcgcgggttttaaaaattaattgtcttgtttttttgtgtttgcttccactcgaaaagacaagatttgcgatctggggagtgtcatgtatgctatgggtttcgtgactgagcggtaccaatcatgaattataccattattattcgctaggaatgctttgtggctatcagtatgttaacttagtaagggtggagggaagatattacctgcagcagtatctcgttcgatctaatacatcagtgtctagtagtacattagtacaacatgaggtcattgacctgacctagcaccaaggacacggtagagacatcctatcaatgcctgtccggctccggccgggactggatatgtataagtcaataaagccgagggtttgattctaagcaagaacccgcttagtataacctgtggagtcgctacactcccacttgtaccttcgtgcttcctccaacccggggccagacctggttagggttagtgccaaatgttaaaaggacttctggtttagtatcactttacattgaacctgggcgggattgttatatgacattcctaggtttatatatatacatatcgacagacagatggtccatgtttcaagtgggcttacctccgacatctggatatatatatctactcacttattatccctttttgctgtcgacaaaatggactagtcataaatgcacatacccgtggacgacaacttaaatctaacaactaaggctaaatagtaggcgatgacaggtctcgagtagaatggtggaatggtgcagtctatacaaccaacgcagcggagtgttgcagcacgaattaccgatatttggtgactttgcgtgcattttggaagatagtagcggaatctccaagttcccgccaatttgatggatgagaactgcgctaatttccaggcagatgagtattggaattgcatgtcggtcaggacttgacaagaagattttctagcaataagactctttattatgcctatgcatggtctataacttggggttcacgacctataaagcatttcccccacctaggtaagtgcatagatttggaataaatcgcacatctgcagttctatatcgaataaaatatgaatacatacgccgtacatgatgtatgaacaaaaatagcatcatagaggtctcagccaattccgataagacactcttggcccgtgcgcctcgacatgtaccaactttccaattcctcgacataacactctgtacctactttgtaccttagagaatgaatcttgcttccatgcgtctctgtgctagacacatctccaataccagacctctcacccgactccccagtctgcacgcacccgcattccccctctcgcgtccattcccgagaatggcatccagcgcgtttcagttcgccgagggcgaggatgcgcagcagcttgcgcacgacgccgacgctttattgcagcggggctgggcgcaggacggagacggaatgggggttacaaaaacgttccattttaagagttatttcaaggctgtggtgagttgtgtcatttgtctggactgggactgcttccgctctgctgtgagactggtttaactgacaatctcctccgtctaggcgtttgttaatatgattgcagccgagagttcgtccaagaaacatcatcccactatgactgtggtaagtggaactttttgagttggtgcctcgaaaaaaagaaattaaggctgacgcctcgttagcggattggctcggtcgatgtgcactggacaacccatcgccctcgcgggttcacacaaaaagatgttacgatggcgcagcattgtgacaagagcgctgatctgatgggcgctgttgatcccggccagggactgaaatgtggtccaactgtctaggttgtcacatttcctcgaatttgcgtctcggcacttgcagatggttctttattccccccggtctggccccctcgacgcacactatcaccagtagatccccccaccggcggttggaactaggctggatgcgaatttccccttgaaatccttggtctttttttttttcttctctctctggatgtcttctttctctcccgaaagggtcgttcctcgattgcgatttcaatctcgactccgatttctctctattacacatttatagatatattcaaacggctatttattgtcggatgtgccatgacgtcgagtcagtccatgcccacgttcccttccgatgatcattgcctatattaaacctcgtcgctcctttttctccaatgcgctcgacaccctgaaatcccgaagtcttgaactgtctagagctgtgtggaactctgtgggactgtcttgaacgcgctcctcgacaatgaatccagatccgccatcaattggcgaacgcagaggtcatcgactcgcgcccctacagaccaatttcagtcgaccagctgctcaaaaacgggtacaacgcccacggccaaccgagtatccaagtaccaatggatcagaaggtcccgttccgcttcagtcccacgttaaacggcagtcctctaaaacgagtctgcgcaatctctttggtcataagtcttcgcgcgcagaccccaaattggaggagattatggaggcacagccagaacctcaaactgccattctcttggaaaccgccctgtcgccctctactatgagcccccgaactatagactccaatcccaccattacctccccgacaattgcatccgcgacagaacgatcgcgcgcgacattgaagtacacccgttcgaaacccgaacccgacccttcgagccaggaacagtatggctggaagcctcccccattattccaggcctatccccaatccaccaagcatgactgcctccctgcacccgctctctctgcagattctatcttgcgcctgcacgctacaactacaaggagctctactgacgacaaccctgccaatccgttagagcaggatgaggctgccgatgccgctcgtaaaaagcgggaacaaaagcaaaaaaagcatctccggacactatctggcaccatcaacaaggcggattggactcagaaagtatatgtcctggctactaccggctatattctccaatatgcaggcgaaggaaagcacgaccgtcttcccgagaggatgctgctgttaggacctaagtctgtcgcatttgctagtgacgctatccccgggaaacattgggtagtccaggtctctcacaatccgacaactgatgattccgccgtaccggagcctcccaagcatcgattcgcgcgctttggcttccacaaacatactagccggcggtttgcgcgcaactttcttttggtgtttgacaatcccgaagatatgatcagctggttagcggctataagagctgagatcgaaaaacggggaggacgtaaattcacgcaagagaagcaatcggacgaagacacaatgcctcagctgcggtccaaatcaagcgttcgacaaatggtaaagaaagatccccatcgcatttccagtcttttccttcagcctcagaccctccaatcgcccgccgaggacgaagatggccagtctgtcggcggtgccacatggcaatctcgccgcagttcatatgtgtcggttaatcgtcgctcaataattgaatctcgatccggatcggtgtcgactggccgaaccgacgccacaaatcctaccaacggctctgcttctgtcgtgtctgacattcattcttcatcattcacttcttcgaatatacccaactcgccgccattaggtaccgacgctttcaggcctgatgagcctgtgccggaagagcttgaccgagtctacacgcgcaccccgcccgcttctgtccatggaaaacgacaatccttatatgttcccctgccatctcagcctccccctattgccgacttcacagaggagccacaagcgcatcacccaccagctattcccgaagctctcattcgcagcgcttcacctccagcgcctaatttcagtgtcccctcctttagcaagaaatttgttccgcgatccgggccgatccctgtctctcatgcctctcccccttcatcactcaatgccttttctcgtcatgtcgacaccgacccaaatatatccgcctttgcatctcctccgcaatctccaacattcagcgtcgctagttcgcgctacacagattcatcagagcccaagcgcatactacgaccctcgaattcagaggatgccctgaccaaagccgttcgttcagcacagaatgccaaaaacttttcccgggcacccagcacagcgcctcctacgtgccctctacctgatcccagagcatcttcccgtccactcagcctggtcggccgccctagcatgagtcggaaaggcgcctctgcatcacaggtccctccaccagcagatccaataccgcgcaagagagtctccactatgtacccgaacaaccaggatggtccgagcatgttgcggcgcaagagcatgcccggtctgggattatcaatcgggcctccatctgcaccaccccccaactgcccactccctaagctccctccacccgcccgtcctaccgtcaataccactatccctactgcttccaccggcacgaccgcgccgcagatgctatccccctggtctgcagcgtcctcaacgcaccgattctacggctcccagccagtgcgtgatcacgttgaagatcgcaagagcggtgccgatcccgcaaacagtgacccagcaagcaacatctcacgaactgcccgacactcaaaactgatcaagagccccgtggtctaaatccaccctcccctgctgtgactcaacatcacatctatgacacttcacctcgctctaacatcgattctccaaaaccctacgagctccttctcacgacattaccttgagatgcattccctataccctttttcctttctcgcatctgtcattactatatctggcatcgaggcctcggcctcataatcaaatacccctgttgcacctattgcatatctgacagcctatcatatccattctcttgttgcgcacttcggtcgtaccaaccctggcgtgcgtacgttggttcctcttttgtctttactatctacagattgcttctcttcgttgcgtttgtgtttttgtatataccccgttttattctattctaggagcatatctcttccctcttctgaactcggtatcttctgtcgagaagtataagtcacggagatccgagcctgtacattaccatatttccttcttatctagcatctgaaatatccgaatacaagaatcctacatcgatttgatgcccgaagagaagttgtgcaatgaattaaagacagaaataaagagaaataaaggcgttcccaatgatatcgattctcagagcaaggcctaaaacgccagaatgaatatggaatatggatcttgaaaatacaaatatcatggatggtttgaaataaacacccgcgttggacctcgttcgaccaattccggtctatcggctttgaatatcgttcacaacgtagactactcctccgcctcttccacacttgcgctcagaactcgtcgcggtgcgactgcggatggggtagaagttggctcggcggaggttgtggttgccgaaggggcgttttctgaaggggcagctgagggagcagctggggccgacgcggcaactggggtgggagcagaggctgaggtcttggatttgctagcctttttgctctttttcgtctgtagggttgaatagtcagctttacgatgtccgaaaatgtgtcaatagagaaatgcgtacctcttgccagccccatagaggcttgaaactatcgaagaacccaacatcctcaaacagattggggaatagccagagacccggggccacagtgaagacggtaatgcagaatagaatcaaacggaagatagccatggcgaagaagagacccaacagtcccatcataccaacactcaaataccacactccctggcgcataatcataggccacaacgggaacaggacaacggcgaagataccggcaaccacagcagcggccatggccttttgcttccactgcgggccgtcatacaaccaaacataatgcatcatggggtcagtctcttggtgctgttcgatcttcacggtccatagacccttggtgcgattcttgggcttggcatggttgtggccttcatgggcatcaaccttgctcactcggagagccaaaagggaaagtggaagaagcttgaaaacgttctcggcggaggcgcggtcggtcactggggggaggagggagttcttctttgaggcggctttggcataggcgggggattcaatggctcggattgcgcgcttgactacattgaatgaacactgttagatggcgattcctcggaaatatttagatcttggtcgctcacccttgaacatgtccttgcgctgtccgtccatgatacatgtgcgtggcttgaggttctgcgaccgcagccagttggccactgctattgcctttgggtccggggggttgttggggttcaccgggacctgttgtgtggttgtgtgttggtgctgctggggtgcgggcgacggagcttgttgtccttctgttgctgcttgggcctgttgttcggcctggattttctgttgctgctggtgggcttgcattgctcgcatgcgcaactgcgcaacatattgctcagtagtcagaccgagctttgtagcatcggcagtcagctgttcacgctgctttgcggcgaactgctggggcgtcatccctcgtttggcggcttcggcggcgaactgttgttgcatcgccgccatctgctcagggctgggctggccaggggtggccattttgaattaaaatacgggataaaaagcagaagagaaaaggaagtccaaggcagaggaagttgtgaaagaaagaaagagaagtggccacattgactcagctgatttgtccgccttcccgacttccccgacttcaatcttcttcccttttagcaacgaacatcaccctagacatgcactgaacatgcgcttcggagctatttttatgtcgatgctcaatgtctgtccaatatgactcttcagaaaccttgttaaacgctacctgggtggctgttcaactggtatgtgtctcattgcgcagttgatgcctccccgcttatgcgaatatcttaattcagagcgaacgagatgtcgctggccagattccacttaactatgtgacgaaccctgctgtagcattgtcggctgcctgtttcggaaacggcatctatgatcaacaagatgctgcacaatgtttctccaacctcctcgcaatcgggtaccgacgttttgttgtcgatctatattggtcggtcagccgtagaacttggtatttctgtccggtgtctattccagtcagccctggggtgactatatcctcagccacctccacaacgaagacaaccacagcaacagctagtgcggactctgcgactatcaccggtaccgacgattcaaatggagacacactctatgagctaggctcatacaagtgcaccgacaacctcgatccctataccttggcggaagtccttgtaggttatttccgagacacaaactcccgtttgaccgtgtacacgacctatctcgttctcaatctgcatgtcgccgcaagtgcctccacgccaaatgagcctgcttctaccatatcaggaggtcaattgccatcgggaaatgagctagccggctcaattctgggaaccgcgcttgatgactttatctatagtccggctcagcttgccacggacagaagcaatctgaaccaatcatggtataaggtcgacgagggctatatgcccatcacggagtattttaccgttcatgaaaatgaagcgggtgaacagagcactccggatggctggccatcatcaaagtacattcagctcgccaaacgcgatcgagtactcattggatacggctccatcgattcccagctgttgaattacaatctgtccaccgaaggaaattcggtctttcctcctggatacctgacttctgatgtgacggtctccgcaaccaacggcactctgacttcaggctgtctatatgaacctgggttcacaagcgtgtctcaaaccaactcatcatgggctatatccagtggcctccctgtccttgatggcctttccacggatgagacgatggcttcgctatcgaatgttctctccggaattacagcttgtggtctctcgccaatgctgaacactactctcttcgaccagactgcagaccagcaagttgaacattaccgtaacttctcactttcctcttcctgggcttgggtacttggtgagccacacgatgcgaactatggcggcggcgacggtgatcccaagtatgaccgctgtgcaatcatggatctaacactcaatggccactggcggtccacgaattgcactgagaagcgtcgtggcgcctgccgaatcggtaattcgcctttctcctgggttctatcagacacgatcgaatctttctctaaagtgtcggacagttgtccaccaggatcaagtttcgctgtaccgcgtaccggtctcgaaaacacgtatctctacaggcatcttctctctctaccagaaacaacagtcgacttgagttccgcagatcccgcctttcgagaggtcttcttagatttcaactccatagatgttacttcctgctgggtctccaatggctatgaggctaggtgtccctatgcctctgatccgcagcaactcgagcgcaaaactgtacttgtcgctgcaattgcaggtatcatcattcttattatcacagccttgactttctttgtcaagtgcaacgccaaccgccggaattcccggcgcaggaagcgcgtcatcgaaggatgggaatatgaaggtgttccctcatgagacactctatacacctgacatgtaccctggaagtgctgtctcggcctttttggttgtatgtcaagattgggtatctttatatacttcacatctataattccaaggatcctgtcctctgtagcatcgaacttgtctaaacgcactcctctcaacacccttgaggggcttgactctatggtggctaggaataaacacaataggcgactttttgaaataatttggttctgtattctatggagttcccttttggctgtctctccttacatggagttcgttatttctagagttttatagactctcttgaatcgtataaagccgaagtttatacacctattcatttagaccgtctagctgttatgcttgatttgaatgttcattaaggaccagaactagatacaacaaaataaaaccataatacataaaacaaaaatccacacatatttccataaaaaatcaaaccaatggaaactggatataagtgtcccaaacaacgctacatgccactcatgaagacaaaccgtaaactcctagaaaagaccctggatatcacattcaaagcccggcaaaccgagcccatcccgcagcccgatttgctgaagagctcggaacctgtgggtgagtttcgttctgctcgtggctgggaggctcatcgagaaggctttcactgcgcccttcttcggcaaccttgccactcacatcgcggcggcgtccgacgcctagaccggcgatgtaactcccgtatgtagatagggatgcaccaactccggctgcaatgccagggcgggcagtgtctgcgccggtgttgctcacgacacggcccttgcggtcgctttcgatggcgcgtggcgaggcagttgacaggtatccattttcttcatcgttgtcgttcttcttgagggccgcataagcagacatcttgctgctgcgtttcttcgtaagcttggtgggcttgcggacgacctgttcacttggatcgcgtgacgccaatccaggattgccattaacatccagctcaccatagaagcgggtcttgggcgaggtgggcttggggctatcgcgtggaacaggctctgtctgtgcctgtgtattgtgtgagagattggggctctcgtgtggaagagacactggctgtgcattgtatgagatattggggttatcacccaagacaacacgccgcacgggatcggtgttctcgggcctatcggtcaggataggttgcggagttggtgggttaagcatgagtgggttaaatggaagatactcgtcatgctcgtcatcaaagtcgtctctgtgatattctgggtctgggaatatgtccatacgctgatcacccacatcttgttcacggcggttatcatcaaggccatagaattcatgtgtggtgagcgacgcatattccccgcgtacatcctctgggatcgcactagcagcacctggctcaggcttggggccataggcaaaccagtctcgaataccactactgacagacgtcgtggtcttgttgctttttcggctgtaaacagaggaggactggcggagagtggctgcgctctcgtcctgcctctcacccgttggcgatagagatcgttcagagtatgccacccaattatcggacaatgggctggcagtatccgaccgatcagcagtacgtgatgacagatgacgcaattgggcagtagcatcgatgatttcgggggcatgcgaggcaactttccgatattctggggcaggtgcctgtgatgtgaagtcatagggcagactcgcgggttgttggaatagtgtgtcggggctggagggatccatgtaaggttctgttggggattccaagtgggataggcggtgctggtaaaaggatggatgtgactgccgctgctcgtcgagcatacccatcgattcacggttgtaatcaccaccaaaagactgttcacgtgtgtgcatgaacggcacactgcgaggagatccaatgagcggatcctcgaagctggaattcatggtggattgactgagatgtttctcgtcggttcgagcctccttgtggcttatgcggggacgtgcggtcaaattgtcttcaagtgggttcatgtcaggcggtaggcgggagatcttccggaatgtgacagccaagaaacccgatatagcaagggagatgaggtgcaacccgccatttgcgatcgccaagatgaaggtggcctcggacagttttacagtcaggtcgctgttgttgaagagagttccccagtgatatgcattggaggtccattcaccatacgcgataaacgcagtaaacacgtaaaatgggatgattcctaagtcgacaatcgcggcgaatagcccatagctggcctgagagcctgtgggacgcctaagagcagaccggcaattatggtaagcgccatatatggtgtggagtattgcaactatgggctgcaataaaaattagcaagagaaagtcttcttgggtgggccgtactcacgccgacgcgaatgatccagatgacggtcactgcagctcccttgataacgatagagcaaaatagggacccaagggcgcccagaagactgagcactctgagtgcgagctgactcccccgtgcatacttgacccgattctttgttttgtagctcatcggtgtaaatgaactgaccgtattgaaagaaccccactacatccacatccaccattagcagaatccatcactaattaccgaaaggacacacataccgtgtcagggtgtcggttcagattcacttgggattctttttgctttggcttgtctgttggacgagtccaaatcgtcccggtcgcgtccctcgggttgaagccgcggtcggtcggacctttgaaggacggactctcataaaggaatggaggcgacgatctccccatggtagcgactaaatgccactcgtggcagccacgcgaagcagaattaaggaatgttgacgaagttgaggatgtggaatgcgactgtcaactcctgggatgtgcccaggtcacaagtatgtcgtacatccgcaaacatgcgatagtcacccggggcaaccgataagggtcacgtgccctgtatcattatctccgatcacctctgcggtttctcgaatccatgcaccatgcaattaaaacaggcctttgtatgtgctcaatgcacggtacggcttaatcgccggcctcttctacggtgccagagctttgtctctcaatttatatccaaacgctccaacagtcatgtcgcccagtctgatcgacccgtccgtgtggccatcgtgggctccggcccagcgggattctatgccgcctatcgtcttttggctaaacaggaagatgcgatagttgacatgtatgagaagctacctgtgccattcggcttggctaggtacggtgttgccccggaccatcccgaagtcaaggtgagtcacggtaaaccgcgattcaatgatgagtcggtcattgaacattgtatgtagaaataagctcatgattatatgaaaattagaattgcgaagataaatttacagaggttgctgagtccacgcgcttcaatttcgtcggtaatgtcgacatcgggcatgatctgccgctcgctgccctcaaaccacactatgatgccatcatattcgcctatggtgccacagaagacaaggagctgggaattcctggagaaaaagctttacatagtgtgcactcagcccgtgcctttgtggggtggtacaatggtcttccagagcacagagatctggatccagacctaagcggagaaaacgccgtgattgtcggacaaggcaacgttgcactagacgttgcccggattcttcttacggatgtcgaaactctccaaaaaacagatatagcagattacgccgtggaaaaactcgccacaagtcgcatcaagcgagtgcgagttgttgggcgccgcggacccctacaggtgggttacaatgaatcgactgacggtacccaggttgctaattacttgacttaggcttcctttactatcaaagagattcgtgaaatgctccagcttccagatgtatcatttgatcccattccagacgatatctttccgccggaagaggtcgtatcggcactgccccgggcgcagaagcgtctaatgcagctcttggctaaaggttcagccaatgaccctctgaaatcatcaaagtcttggtctttggatttcttacttgcacccgattctcttcactggtcacctgattatccataccatctatcccacgtgaagttctctcgcaacgaacttgatccatccgacccctacagccccagctccaaggtgtttccaaagcacttatcgagcggaaagcgtgcacaggtgaacctaccagctagcgtcttcttccgcagcgtaggctacaaatccctcccccttccagggctagaagatcttggtatcgacttcgatacccggcgcggtatcatccccaatgatggatttggccgtgtaacaagcttgtcgaacaagggccagcctgaagcgttacctgccggatctctcgtctcccacctacccggcctgtactgtgctggctgggtgaagcgaggtccaacgggtgtaattgcctcaacaatgaccgatgcatttactactgcagacaccgttgtgcaagatctctcaaaaagtgcaggctcaacgtccttgctcaatgcacccgatcacggtagcggtctaggctgggatggggtgaaaatcgaggctcagcgccgtggtttacgccccacatcgtggacagactggcagcgaatcgatgcggcggagcgagagagcggccaacgaaagggcaagcctcgggataagcttgggcgtgtagaagaaatgttgaaggtgcttgattgaacctttatgtatattatggactatctgcacagagtttgacaattctaaatacatactcagtccaagacttcgttttcccttggcattacaccgctttcgtgtactattccgtcccttcattatcacattccatagatcttgtttaacgctcagagcccgcacgcgctggcatccgcctcctcataagtggcgtcaatacgaccaagttgctccgccaggccgttggtgagcgtgttcatggcttgcaggccaatgttgaagccacttggggcggcatcgatagcaatgacgtagattgtctcgtcaatcttgtcgttcgagtagtgcaacgcgtagcatttgccgcagttagggctgttccagcccgggatggtgatcgcaccgccaatgttcgggaagcttggcagtgatgcgaagtcggtgtagccttgagtgaccaggccattaacaccgtcggagcaggagacggtgttcaaggatgatgttccaacatcatatttggggtcgtaggagacggacactgtttccgctgccgctagagtcggagcagcagcaacaaggctgagggatgccaagaaggcggaggtgaaggtgatggtggacttcatgtttatggaggatttgatggtactttgaggaagagtataatgttttgattgcttgttgtatacatttccctccctcccgacgaggtttatatatctccatccgacaggcctcccaagtaaaattgctctaggtcctctttgctggcaggccgcattcggcgcaggttttagatgaaggtctcagattcacaggtgacacagcccaaataggatgcctttatcttgtatccatcagccgatactcccgtaatagatcatcccccagaaacaggtgcaataaggccgatgtctattgtggggttctcgagggaacatgcaggcagagcctggcagactgagacacggcatatcccgggtgctattttcatacgatctgcagaaggatgacatggtcgatccacatacagctcacgcgagattctctctatgctacatacaatagggcgactgcatctgaggttgcatcataacacctcgtacggatacatagaacgaagcagcatagccacatttcattctcgtctgagtttgaatcacaatttaaaattatttcaaaagctgaactcattaaaccaaaaaaagaaaggaataggaggaaatgagggtaaagtaagtagatgaggtgaaaaggcaaaagaaaaacaatcgtccccgggaaggcttgaacttccaacctcccgattaacagtcggacgcgctaaccaattgcgccacggagacttgattgtggcagaggtcaataggaatggcattatgagcatgttttaatgcaatcgattttatagagtgtgaacagatcatagctggtacttaattaccccccttactattgacctatgagtaacgtgtgagtaacgtataagtaacggctaagtaatgtttaagtaatttctaagtaacgtacaagtaactaacgtgcaagtaatgcgtaagtaacggctaagtaacgcgtaagtaaagtctagttgagcaaccaacgtctaagtaactaacctataagtaacgcgtaagtaacgtctagttaggcaacttctaagtaacgcctaagtaacgtctaagtaatgtataatagaggcttggaattttatgaggctccggaagcttcaaaggttctttctccacataactatgcgccttaccgtgattagtcatctttatttttttttttcactttcctctttctttgcttttgttcttgaccaaaactgaacctttgaagctggtttcatagttggtaagctccgagtgattgtttctggtgctacaagaaagttaaaaccgcttaattgtgactatgtaccaccaaccgcaggcatggccacttcccatggtgatgtgccaagtaaggccgactcatggcagaccgacatatcacgattaacagcattgccatcgtaagcgattcattcattccattagcaagggatcttgctttggctcccgatactgatgtatagatatgtaaaaaaaaaaaagaagggcccgaaccgcgatttgaacgcgggacctcgcacaggttcacccgaagcacgaatcatacctaattattaattagttgagattcgcaggacagcttattgaagtggaacgtaccactagaccatccgggcgtttgtgtgctagagttgtctcttttaggaatcttgaattcctgatttttgccacgatctagtacgtcgtaatctactaggtcgtcaacatatgcttcatatttgcttgcctactgtttgcatgtttactggtttgcattacatagattgagatagctgagtgagacgttcaaggtttgcaacgtttgcaaatggccagctatatgggtcagggtcggatggtaagacggctaccaggacaaaacttgctagacgttgacctcgaaaagaggaaggacattttcccccgaatcgtaaatgtcattgtgtacctaggacaaatcaaaggattgacttctagtccgcttaccgactttcaatgggtcagttatatatatgaggattacagcgctagaacgacgttaagtctatggaagatatgaatatatatatctgcagcctcaagttcaagcatcgatctgatatcacatcacaccctcgtaatccctataatggcgatatctgccgaagatatcattcttgataaggacggacctatttgctttctcaatattctagatcctgtgcccagtttttcgaagtggccactattatatgtccatggtatgattccttccaagagcctcccgtgcaggaaggtgagagtgaaatgaacttgacggacgaagagtgacgggacatacagcttcttcctcgtgtacgccatgcaaatttaagatggattggatgtattgtgagagaagaagttgcctgggcaacctgattagaggctagttagatatatcgccatatctagcgatcaagtctctcatatcctgaagcattctacgataatgtgagctgggcggattgtccatttccacgccgatgagtgtcacttactgttctcgaagatgtcgatcttgggggaagagagccgagacatgcgtgttaaaccgtctagatatcgagttcagcgatctgatatatgaaaaagatgggattggtatacagtttatagagatcgatgcgaccttggtagtcctccactggagatgatatggggaagtgtaaatgatatgcttgaacatactcggaagcaaaccggttgcaaaccggtgcccattgtccaagttcatctattaagtttggttttagtcggttagtaaatccatgggctcaatctaatcacgacatacattcattatgagcgtagaaagagcaggcgtcaaacataatgggatttcctgtggtggcattcttcccggtatttccataccataaatcgccatgcaccagacagggcttgacagatcgaccttcactttcgaggggtcgcagcaaacgtgggatcaccttgtcaaatatgacaggactcaaaatttcgatgtcttcgctgggaccccgagctgaaatctcatgcgtcagtgcgtgtcgcattgatttagcaaagaaggtctcccagctgtccgaccactcattgtgctgtgacaggttgccgctataggtagtgacgtggaatccaaacttcccagtcggtgacatgctatcattgtgtagggccccaaggcattcagtaaactttcccacgtttggcagttcttgatttatatccttgaattcacataggaaaaaatgtgtgtcggatattgtctcatatgtaccccagccgatcggcctcggaacagaatcagggatgagattatagattgcagtcatagactcaaattcgccgtgaaccatcgctctgccactctcctctagcagaaccttcatgaagaatctccgaacagacccgtctaccaattcaacatcaatgcgccctgttgtagcccgaaagctaaagccgtgattctcagttgatatggctttggcgccatccggaagctctgtcatagtcgttattatcaggacacatttcaagtaagtcaagcaaaggatcactgatactcactagcagcgacagcggggtcaacttttgcgtacggattcccgacccctaagtcttggtttgcttgaaaactcatgactatagcaaaaggggagttattttttttctgaatcttgccgatgaatcttggatttagaggtgtgagtgaaagtttgcatgaggtttcaagaggaatcaggccggtatggtttgttcctctgtgtctcaggcaattacagcttgaggcttagcataaggtgatattgctcttaccagaaaggacccccttcctccacgacaggcaggtgacattgggcctttcttggcgacctcgtacattgttttgtttgcccgcgcgtatttacagtcacgtggtaaacattcacctaggagatataagacctacccgtccactcatcctccctaaaaattatgtagaattgatagaggaggatgaaattaccgacggagtgttccgcgttttacacaggggcgaataataccatatattctcaaggtagtcaaccgccccctttaccagccacgcgatacaggagtactatagcggtggttccttacaacgtgttctaaaggcattattcaccgcgcaaagaaaacccatatggatttgaaaccttcagatgttgttctcgacgataatgacaatgcggtcctcattgacattagcggcatcggcgaagtaacgcacgggtggcgtgctccagagatacaagatgaaatatcaccctttgaacttcctttccaaacgcgtcgattgaatgacatttgggcctgcggaaagcttttgacggaaattgcatcaaacgccgggaatagccccttcgtaggaactatgaagtgggttgcggatcatttaaccaaagaaaatgttcacagccggtggactctatctgagggaatctctcagttgaagggcgatcctaccccggagttcgacctcgtgaaccttgcgtaggataatattatgatttttttttgagtgtatacaaactgctatataggaactataatcatatctcatactccgtagagaggtgacagctatcataccaatcgagatctattgtccgctcggtaaccatgagaactgagactataagtataaattacatcttctctgagacaatcactctctttccatcatatattcttcacttcacaccattataccaaccccatttcatacccagtggccgcggtacagatatctaatgagttaatcataaatcaacttgaggatgaggtcaattaaccattttacagaaatgtcctcccaggagccacctcgtgatctagtcaccaatgagcccagagctacggcagttcctgacccggcccgccctgactcttctcaacaaactgaagcccccaaaagtactttggtggctctcaaagatgcattggtagtctctgacaggttgatcggagatatgtccttggagcgaagccgtattcgaagacacatcattcaacagcgcacagtgcttgatagccaaactgcgcacctttctgcaaccgatacccgaaccgagaagcttcagcttctttatgacagaacggtcaaattggggtcgacagccaacaactaaatggctgtcttacaacgtggctcggatattttgcaatcatagattcgatgtcattggagcgcgacggaaaaaggagcaacgcatcgtccatcacccctactacctaattccattgattggctgaggaagggatgcacgtcagcaacaacacagaaataaaattgagtcttgtcttttggtgccttgtaaatttcctcatacttacctcagtctctagtataactagttatggatcaccgctactatcttgcctaccggtgagagatgtatattgggtacctgcgtagtacaaaaatcgacatgaatttcattaagtggcacgatgaatcttagacttcagctggacctaggtaaactcagccctagcctaatctgtgttgaaggccctaaattggttataaaaaccatgtcacgctaattatgcgtacaattctgctgactttacagtttatgaacgccaagaccctaatttgggttgggcctgggtcggaggtattgatgtatgaatacttatagtcaactataactagttagggaaccttgaaatcatatgataatttgtcagcatatctgttcaaattccagtgtcgtcattcagcaagagagtagtagttacctgccagcaaatcgcccaactaaatcggcctagtgggtaaagatcagcagtgtctccccgatatctgaagtggacagccggctgcggccaatcgccccgcttatctaacgcgtggcctgcacctgggcaaccttggaaggcagcgaattttgttaacggaagattgtttcttttcttttcttctcttcttatcatttctcactgtgcgttgcttcagacctagcttggatttcactgttggctttctgcactcgctggacccggcgggattgttgtttcctcgtttcctcattgcttggcgcatacgacaccccatcaattagaccatccgcccaatatgcgcgacgattatactcaaaacgaccctggcggcttccaatcaagtcatgtgttgcacagtaagacagcagtgggcagtgcatacccgcctgcctacggagagtggagcggagaagctacaaatacatactccagatgggacccccgggaatggtccttgaagaagaagattttcctagcggccggcatcgtggtggtaatcgtggctgttgtcgttggctctgtcctaggagtgcgagccaatcggtaccccaattactcgaaactggattacagcttgaaagacgaattttcgggatcgaccttcttcgacaacttcgaatattttaccgccaccgacccaaccaatggatttgtccagtatgacctacaaaccaagcctatgccaagcagatcaactgacgtgtaattcaggtatatcgaccgagctgcatccgaatggcttaatctaacatacgcctcggacacctccgcggtgctcaaggtggacacgacatacagtggatcggaggctgctaatgggcgccaatctgtacgagtcacatctaacaatacctatgctgatgggcttttcatctttgacattatccacaccccgtacggatgtggaacatggccagccttgtggctgacagaccccagcaactggcccgagcacggagagatcgatgtagtggaagctaccaacgctggtacttttggaagccaatcgacgcttcacacgtcgaaaggctgcaccatgggcgttaaacggaaagaaagtggcactgtggataacgagaactgttactacgaggcgaatgactatgcgggctgcggcgtgaaaggcgcttcgagtacttatggtcccgagtttaacagcaatggtggcggagtaagtgatggtgtcccggactgttcatgcttccatcgaaaccaatttactaataaccacccctttcaggtctacgcgatggagctccgtgacgctggtattcgcgtctggcaatgggtccgctctaagatcccgtccgatatcacctcgggcagtcccgacccatccacctggggcaaagcacttgcggacttccccagcacggattgcaacatcggttctcatttcaagaaccagagtatcatcatcaatatctctttgtgtggtgacttggcgggcgcgaccaaatactacacgacacaaagtagttgccctggcaactgcacgacatttgtgcgggataatgcgactagtttcgacactgcgtactgggagtttggcggctttaaggtctatcaaacctcgtgaatttttgaattgcagagtgtgattcccctttaatgtgctcctgaattgatgtatgtgggtttcgatcactgccggggttttggtttgtgctttattttaagagggcggagttttcagggcagattgtgcaatcagaggagcttgagatctcatcatttaggtgatgatgaacaaactctctgtgtatttttcttcgtaatagaaggctaattagcagcaagaccaacgttatatatcttccttcgtgtctttgaagacactagagatccactgataatcattgcaccttgcctctcgagtcgacaggccagatctcctcaatgactccacctcgatgggcgtaatagaaatcgtgcaagtttacggtagggtcaatgtggctcggtaccatctcaacgcgatccccaaccgaaagcgccggggtcccttcttcccaactgagtgagccgtgctcgtcaccaagcacaccataagtgtacctcgggtccttacactccgccaagccactatccgtcgtcaacgatttcaacccgctgtcgattgtgaccgaccgaggaccttgtttgctcagaacagttgatagaatcgtaagactgttggagtagaaggtaccgacggcatttcggtaatcggtatccatgaaaataaacgatccaggctggagctcagtgacgcccggcactgtggcgcagaactccgccgttccagttcccccggtagtcaccacctcgatattgaagcctgccttccgcagcacgtccgcagtatttgtgaggatctccatagactgtagacattgactcttgcgatcttccctatcatgcaaatgctgcaaatgaccctcatacccgtggagcccgatcagtttcaaatgcttcagaccctgcacatgccgtgctagagtcatggctgggtcacccggtagaacaccagtgcgatgaagcccaacatcgagatcaatcaaaaccgagataggttcgtcgataccggccgtcgccaaagcctcgtcaatagccgttgcgccggcttcactgtcaatcactatcctgattttgcggtgtttgcggtacagttccaccagccgttgtacctttgcagggccgataatctcacacgtgataaaaaggtcgtcgaatcctgccgcggcgatgacttctgcctcgctgactttggctacgcagcctccctttgcgcccgctttgaccatcttgttggctaggatcgcgctcttggtcgtttttagatgggggcggatgtcgaggccagttggtagtagcttgtccattagctttttgatgttggcttcgacgagatcgagatctgcgatcatggatggtgtatcgagggtatcgacccggtcgccgactttgggggaatacatgttgatttcgaagtcgagggtctagatgaggttcgaagccagttatgtgctggtggtcagtgtctgggtttgaagcttgacaaggggtgtcgctttataagttggctggagaatgcaagggataaatatgtgcccgtgctgttccataatggaccccgcactaaagatgggcattcgtgcggggtaagaaaatatagattagagaagaaagtgcactaaattgatgtatcccagaggattttgtttctaaaatattcattctttacctaagcatatccagctaagttgaggcatcttctagatccatgtcctttttgtatcagcaagttaccgcataatgtcctaatcgagatgttttttatatcgactaaggtttaagctaaacattacagtaccatggatcggcttagactagtcccgattcaatcgcagctgccatccatagatctgttccgcgccgtcgactatagaactgaaatctgagaggaattggctctttgcttctactcttttatcaaacatcccctggcttttctttgacaccctgtctatgacactattgaggattcctggactaaaccttcacgcatttatcatattgtagagtaagttctgagtgagattttctgatgaattgagctagtagtacggagtagagttaagataacaaatatcattaaatgcgaaggactaagaaaataaattgtatacatgatgtagaacgagcgtcctgatactcttcgcagggctaccggttacttgaccaattcgctgcagtggccgcggtcttggatcgtaggtgtgtcagatagactaggtagtcttggtggccgttttcttaaccttcgggacgcgcacccaccagtacagtgcacatgccgcaaagatattgaagacgatgaacacccacataatgccgaagttgcgccacacatctgagtaattggatgagacagaagtaaggtacacgtttgtgtcgctgatggggcagaagttgcagtttgaggttgcgagttcgtgttcgacgtagccgcccatggtggacttgtatgcttccatgtactcgccgcaggtaccgttcagcgggtcgaagtgcaggtactcgtttgtcgcacatatgactttcgtgttagagatgccgacggacagcataccgctgacgaggtacgtaaatggcgagacgcggtacatgaaattccagaaacctgggagctgtgcgggagtagcaaggacaccgcagaataggaggcagagcatgaagagcatgttgcccgtgttaccggcattctcggcggtttcgaaagccgcgatcatgaagtgtgcaaaggtagacgagaagagaagaaaggtccagatgaagagccacatttgcgcgccgcggagcgtgacggaatcagtgggctcggcgttgcggtacataccgacagggtagtaccagcaaacgaatataatgagagacatgagcgtgttccaggggagttcaacaacaatattcgatatcatgaaagctttccaagagtaagctttagatggacgttcgcggacctcgtacaaactgcgctgggcaacgaaatgtggcatgatttgctggatgagctgaccaaagagagtcaataacataaagatagcgaacatctggttctgaagcccctgcatcgtgttgggggtattgtataaagagaaaccgacaaagagagccgagctgccgcatagtgcagtcttggagtagatgtatgtgggtgagcgccagatttgctggaatactcgggtctggacttcacagagttgttcgtagaaaggagcggcgaattcgcggtagctggccttgtcctcgcgcttacccaagacagtgtgggcagggttgacaagctgggagcgttcaaatttcagttcggtgagatgtttttggacatgtgcatgttcgggggacttgcgccatgtctcgtaccagtcgatatcagtgtggaatccaggagcggcaccgataacgtcgagcatccattccgcggggttagcggtaggagggcacgggggaccaccgttgcggacgaaatagtcaataagaatttgcgagttctcgccaatatctccatagtacacggtgcgaccaccggcctgcaggaagaggagtcgatcaaatcgctggaatagcatagcagagggttgatggatagtacacagaatagcctgaccgttctttttcagtttatcaaggagatcaaggatagcccatgatgtctgagaatcaagtccagaggtaggttcgtctaaaaagagaagtagagctggcctggcggcaagctctacaccgattgtgagtcgtttacgttgttcgacattgagaccctcaccaggtacaccaataacggcatcagcatactcggtcatttctaggagcttgataacttctgtgacatagtcgaccttctcttgacgaggaacgtgagcgggctggcgtagaagagcagagaaggtaagggcctcgcgaactgtgctggtgttcaaatgcagatcttgttgttgagcgtagccggtcttgcgctggaaggagttattgcggggtttgccatcgacaaggatctctccagtgataacacccatagtggtgcgggtagctagggcatccaatagtgtggtctttccggcaccagagacacccatcagtgcagtcaaggtacccggtttgacccatccatcaacatgatcaagaatcctgcgatggtcctttccaatcttaatatcgtagcaaacatctttccactggaagatagcagtctggcgttcgatgatggcaatgccgtccgattgggtcttcacagcaatgctgcggctactaccgccttcgacatcgtcctctgacttgctcttcttcagggccttgtgcccgcgacggaagactaggatctcgcccttcgacttcttttcggtgatgaactcggtagcaatcagatagacaaccatcagggcgaacatgaaggcaaatataatgccgatgttcctccacttgtgcgaggcggtatagccataagccgactcaatgtagtcgtcgccattgacgtagggctgcccaggcactgatccaactgtggagcaaacacggttgtgagttccgacatccgtgtagccaggacctgacgggacgtagttgacacagatgaagtcgcggttgtggaactcattgatcattagagactcaaagccatagctgatgggattgatataggcgatccagcgggcccatccaagcatgtagtgtaccggaatggtgaatccggtgtacatggcgagacccagaattagaatcgcagcgggggccagggcttgaacgagggatcttgtcaatgatgcaatggaccggaagaacatagacatcgttagagtcaggacgaatgaggtgaatacaaagaaaaagaaggcaccaggttcacgcctcaggtttgtcatgaagtagagaaccaaattgtaagtgatagcgttgaggaccttatagggcaaatccatcaacatagatgcaaatgcttcggcggacgggtggtagagggcatatcgagagtgtttctccacaattgcccgttgagcataaagagtgagcatttcaaggccggaaccaaacgcattcatgagaacagcaaagaagaggagagcaccgcgctggaagaagctgttggtatcggccttgaggttgtaaaatatactggcgatgatgagagccatgatggaatttccaattaacgaagaaactgtgatactaggatcaccttttaatcgttgaaaactgcgccataagcacaatttaacctgttgcacgtatgaaagagtgtagggtgacgatacatgctgggccttggcttgctgagctctccgagattgcttgaacttgtccaggtattcaccaccgagtgcaaactttgcattatacatctcaatgtcttgcacgagctgtgctcgttctgctgaggccttccatcttgccgcgaactcatcgggcgtccgggggacgcggtattcataccctggctgcacgacacgctcgagatggctagtcatagaagtgaggaaatcggcgtcagtttgtcggttagggcagatgaaacccatgtcaaggaagtacttcttagccgcggtcgtgcgaccaaagtagatctggcgaccttcgtaaagaacgaggaccttgtcgaagtggtcgtaggcagcctggggagcttggtaaagggaaacacaggccgtggcgccgttgatgtcagtctgcatgcgtagagtcttgcagaattcgacagcatttgcactatcaagaccacgagtggagttgtcccaacattgcagcggcgccatgctaaggcaggcttcggcaatactgacacgcttgcgctctccaccggatataccgcggatgaagtcgtttcccacgatggtatttttggtgtgactgataccgaagatggccataatgacgtctcgcatatgcgtggcatactggttcacagttgctcctccgggaatgtggcgtggcgctcgggcccgggcagcaaagaagagagtgtctccaaccgtgagcttagggaagtggacgtcgacctcagcggtgtagatggcttctcccctaaactcggtggacatttgctttgcgctcacacctgacgactattagcaggaagccttcacgtggatgacgtcggacgtaccttggaaattgatcttcgagttcttgtcgacaaaaaagccgtgtgtctctccagcgatggtcttcaagaaagtcgagcatcccgatccaggtggtccaagaaccacaagcatctctccagcctccaccaagccatccaagctctgcagaatttcgattttgcgttgatgttggcctgtgaccttcctcgccagactgaaagtctctaaccagacgttgccaacgctcttctgataatcggtatcggaaccgaaaccgtgcacattcaggttgctgaaggctatacccagtgtccggagtggatgcgcttgtttgtcctcggtctgcatctgtagcatggccgtgcaccaagcccgggcatggaagtgttccccattggggtccagggtcgatccaggctccgctgaaaaggggttctcgccagtcgttgaaaacgttttctgctctgtgaattctctggccagttggtgaacctcggcctccctcttctccacactggggacgtcgtccttcacactttcggtctcgcggtcgccattggccacgaatttgcccaagctcatgtttgcgggtgttctggttcgacaccaataagcgtcaatcgaatatatcgactatagtaaagaaagaaggactgaagtttcggtatcaattgctaggagcagaagattcatatataaagctgcacattgccctaggcattcttcgctctcagtttggactgaaggcatggataacgtgatccacgcaaacaaggcctggaggcgttttgcgaacatttttggtccgtgtcatgcaaacaaaggtttacctcagccaagatcgatggctcacatcagccacctgggcagatcaatgggtcacgtcagccaaaccaatcaaagatcacatcagccagaacaatctcggccccggggaagcgctattggccacatccacattgatctagtttagatttaaagccaaagcgggattgagccgtttcgggccagggatcgacgtaaccctgtccagccctagagtggtctggtctgcccacccacccaccttgctcttgcttctggcattgccgtggatttcgagcttttatcgcaaggaaacctagatcccatctacttcctacaccccgcaattccgtattcagccagagatcgaagcagcaatggtgaacctccaaaccattcaagcccataatgcgactctcaaatcactagccccaggtctcgtcgcggtgttcggtaagttcaacctgctccaacattttagtctttacgatgctcccgaagcaaatagcccgatccaaaggctctgctctaccccattccctctcttgggaattccatctcactaataccctccagtcggcggcacctccggcatctccctctccacggccctcgccttggctcgtcacaccctctctcccaaaatctacctcatcggccgcagccagtccgccgccgacgacgccatcgcctccatgaagaccataaacccctccgcccaaccgacctttctccagaccgacatatccctcctcaaaaacgtcgacagcgtgtgcgacgagatcgcagctaaagaaaacaagctaaacctgctctttatgacaccagggtatatgacgctgaaaggccgggatgagacggcggaaggcttggaccgcaaattcgtgctgcattactacgcacggatgcgattcgtcaccaagttgctccccctcttgaccgcagccgcagaagacccatctgtcaacgccaacgccagactatcccgcgtagtctccgtcctagacccacaggtctccgtccgcgccggcggctcaggtaggctcgacttctcagacctcagtctcaagcacacctttagcctccagacgtgccaagcgcacgccagcctaatgggcgattttttcctagagggaatggcgcagcgacacccgcatactagctttgtccacgcgtacccctctggcgtggccacaggtctgatgcgtgaactgccggttggacgcgtgctgtcgtctgtgctagggacgctgttgagtccatttatagttccgattcaggagagtggggagaggcatttgtttgcggcaacgagtgggagatttccaccgaaagccgagggggcgaagatggagggggatgtcgcggttggcagtgatgggacgaaggggagtggttgttactgggtgaattgggacggggaggtgttcccggcgaacaagaaattagggaggacgaggggggagggcgcggtggagaaggtgttgcagcataccgacgacgcgtttaagcaggtgtgcgaggatggcaagacatacgtgtgaaatgtcatcgagggaagaagtacggagtaatagacgaagaaatagacgtgtgatacctaggtagggcggagtggtcaaataccgggcttattcatcaattttctcatttatacggtattggtgttgtaacagcgtatttgtatagatcgagaggcatgcggctgccgaccttgaagaagtcggtgcgttcagggcccaggaagactggcgccgcttggttggcccctagagaatcctttcaggggtggcttgggcccacagtttagtttcataactgtcgcagtaccggaatgtctcccggttggagattaccagttatgcgcttgaatttggtttcatccatgacggtaagtgctcgttgtctctggtatgtgggatatcccgaatgagtctaattcactgcagatatcatcgataaagaaatccaagacgcaaacctggaggaggtagagcaggccttggaaaaaggcggacagactagcaagatcgaagagaaaggtggctcctctggaaagcgtagaatcgttgcccagattctccgcgagatgatggcaatcgaccccgagagagcaacggttgtcaccaagagctgggccgctggtgttcaacattcgagtacccggcaggatgacaagcaattcaatactctcgaggagtacatcccgtacaggtgctttgatgtgggatacgggtaagtctcctgcacccaccaacgaccttagcatcctaggtcaaacctctatccgatactaattttatcctgctatcaaggctctggcacggccttgtcgcgttgagctgcgctattaccatccccgaggaagaggccgatgaggcgagggagcttctcatgcctgctggaaattctagcctgcataagtgcatatgcatggtatgcagtttatttccttatactatgaggttccacggggtcgagattcttagtgagcgccgccacccttgtattattgcgggcttggttgttgtcaattgtccgcatttctacttaatgtagccgctatcaataagctgatggccctggtcgtgccgtaaaagtctgtatgctcggtctggtatgctgatatcacgcgccgccagcctgaagcctatcaacgacccgaaattatatttctaattatatttctagctgtggacttatttccggcgtgtcttcccctctggtactgcgccaccactcactttgccgcacaagttctccatcttcaccacctagcagagtccaatactttttcaaaaaccacacccttgcctcccagctgcggacgtcccacggcgtacctgtcgaaacatatccagtggagttatttcgatccttcttcccaatgcctgcacctccccagcatactaaaccgttcagcatgtcgtggaagaagttatcctcgtcaacctcttcctgatgggcgatgagaccttttcgtagtgtcgggaaaggtagaatatctatgtatggatgatgcttgacagtgatttgttcgctgctcggcctcaagtccggcttcagtgtcttgaatgttctcttcactgtgcaaatcatatttgctttggccatatcatccgctgactccgtgctagactggaagaatggcgagagagattcttcggcacagagcgtctcctcggtaatgccaacatgtattccaagagtactcagtgcagctatagtgcagactgtttcgatgcgaaggttgttggcatatggatctgctgcaggtgcactcgatccgaatctgagtatcctaacctccccacagctgaaggggcctgctggaccttctgtccatatctggaagtgtgggctggaacagccgcagtcgatgttggtcgtccagtatagaccaagggcgtcattttgtttatcacaaatgagaagagaaggatcaacatgtgttgtagaatcccatacgctcagtgacggtggtgtgccgtctgactgcgaaacatgcgttggagaatcccatatactcagtgatgatggggaggtatctgcctgtggacaatatgttgtaaagtcccatacactcggtgctgatagggtgtcatttgactgtggagtaaagtattggcattctctcgaagtcgccgtagatggactggaagtagatatatcccaagtatcataagctgggaggctctttgcaatatgggttggagcagtggttgagctaatcgttgcgaccgcctcggatgggcctgtacccgcagctggtgttctttcagtagcacggcccggcgtagcagatgctgcaagtgcttcgagactctctaggcgctcacgaaacttttctcctagacgaaggattagtattcctttttctggggatccctgtacccatgatccgtatgttgccggcatgcctatgccagagaagacctgtactcacggtactttctttgtgcttgagcgttctgctgccgtctcttctctgggtcacggcggacaggcttccgtttcgcctttcccacgctatcactctgcagtgttccttctcgagtctgaaatggcatcgtgtaaaatgttgggaagatgtcaaagatgtggctagaaccgttgcggcacagctgctgtggggaccatggctgacgtgagccacatattttcgcccggctccacgattggctcttcttaagtactgccccactttatttgtcccacagagatcggagcagccgaagctatgcctaacatagtaatattgatgccttagaatcctgctggaccccagaatgcaggattttgacagtgctcttccaaatccgtctacttctatgctttacatcctgaatattgagatcaaagatcccgaaattagttggaaggatattttagaagcgtcttaattgcctatattaatctcatattttttattgattttatatggttaatgaaaagtatatgaaggtgacggtcctcctctggagactgggacttcatcatttggagatggttcttaccctcaagggcgacttttaggtcatgtgacgcgtaacaactattgatcctatcaggctaagcccagttgggaaaccggaaaacatcggcaaatgggaattctggtttactcgtgaaaaagaaaggagcggtctcttgatatggctaagaattggcaagaaagcaggttaccggaataaggtattttcgaggcatttttgattgagtcaatgtctgtcagctatccaacgtggagcgatggaagtcggttgatgccctttcaagcgtatctgaggtggttctcaaaaatttgggaagtgaggttaccatcaaagatagttgatatcaatggttaagtcatagctaggtgagagtatatatatgatttatgtgtgatttccggtgaagggacagcccaatagatttctcttaacctaggatctgccatcccttgtagtgcaatgaagaaaaagcattgtcgcagtgttgcactgagtgcctgcccaccatgaaacgcctcatcgtacctaatcactggtgaatattcaagaccagtgacttccaacatctacttcccggacaaaaattgtctcatcgtatgttgtcaggaacgcatacttgaggtccagctcacgcatttgaccggctaattgccctgtccgttatatgaatgttagccttagaacgtatcgagcttgggggattaagtgataacacgaacctaggtagcgcctctcttcgccgtccccgaaagtaagaatagccgtagccagtatgttcacactcagacaatcccacggcgtctttgcctctccgatgaccttgatggctttgtatgaatcaaggataatgaagtccggaacacctctgaaggctgttgctagggttgtctttgttgggacgctcagggagtggagagagagaagacttttgcagttggaggtaatagtagtaagatactgctgggatagtgattttattaatggtataacgggatctgaaggcgatttgatataaggcgagagtataaggggatccggggacgatacaatagccaacacctgctctgtagctgcacgttgtctagaacgctctctctttttggcatcccgataagattgatactgatcggtctctcggttgctggcgcgtgagcaaaatagctctaaaggatgcgagtgaccgcatctagtatatattttgaaagctacaatgatagagaaagtagatgcttagacagagatatgctctgcttatatgctctttgtctgaaagaaaaactagatgctttatctgacatatctgctctgcctgtatgctcaatgcctgaatgatcattatgcacccatagagatcatggtcacatgacacatacctaagatgctcctctttactccccaatcaaacaggacaaacagggcattcaacagcctcatttcccacaattgtgataaatctgcctatggatcgacaagccacagaaaattggagacgagtttcatcttttacctgcaagtcaaatagtcatcatagattctgctcgtaaaaggagcctttgatatgggaatgtacagagtcttcctgtcaacctcggcagttaccaccggctccactcacacggacgtctggactccacaaccggccccgccacgaagggaccgaatccccacaaggacaacgccatggaaatcggaccggaaccgaacaagaagaggctagctctgagtcggtgtcggaagataaatagatggaaatggtggtgtgatgagttgagaaggggctagaatggcagggaataagttttattcaaaccttatggaagaactttttacgctattcgtaggtgaaaggctaggctgagcagtcgatgggctagtcatgcgaataaaatgagcgacatggttagttttttatcgcagaggaatatagggctggcgtccaagcacaactagacagagcattactatctgtattgatgcaacgagattgaggccacagagggcgaatatctcgcttacatcggttggtccgttatagctaggtttgctagtcgaatagtttgtttatttattatctcaccgaggttgggctactgtcatgagtcacaagccaagatacaaattatggttcaatggcttactgatgataagaaattaatttattgaagctagaggaccgcgaataaaaggtgtagaggaaaaaaaacccggatcagattagaataatctatggtatgtggtgttcgggcgtggttgcttttggttggttcgctttcagacattcactagattcagctgagaggactatccagatagacgagttggttgtacattgaatttgatcaatttgaagaattaacctcggctttggcttagcaggatgaaatactatacaacacgcatccatcgttgatttttggcatcatgtacgaataggaaatataacaagctgaaccaagtatgattagatatagaactttgaaagccatataaacataagaacgttaatcattactgggactaacacatgaacagccgcacacttcccctctcgcacctattatttagaagacagccccatcccaaatcaccgaattttgcgtagcccaatcggaacattatcgtcgactttattttgaggtgcgtcatcattccagtccacattccgggtggaagccttttgccggaagaagcgatacttctgcaaaagccttctatagaagaagagtaaggcaactccaataaccaatccagccacagagccaacgacaatacccacaatagctcctcctgaaagaccagagcttttttcactcgtggtagccgagttcttcgttgtgcccgacgccgcagtagcagtagacccagatgcagcggtcgtggtagtagtcacatcggtgaactcatcacttgtcacattgaagcaagggacctggtaggtgaatttgctcgcagcgacgtatgtgatgtctgcacacgcgtagtaggtttcgtttttgtcggtatcaaaatccgaggtgtatttgatctggaaggtggcgttcgttccctcttctatgtcgatcgatgggttggggacggagtagcattcgtgtcccggcttaatgtcgctaagagtagagccattaatgaagggctcaaagtcatcattggtacttgggtctaagggaaggtcagtctggatagataggattgatgaagttagcttactgctcttgtgagagatagcaacctgcattttccatgactcgtcttggagtacaagtgcgagcttgccgttgactacaatgtcttgtcagtatgtccctttttgtggatagtgaggctcttactaagtgggaagttcgttcggttcacgggtcctgttgatgagccgcatggggcgttgttgtcatacgctgcaccccagagacgatcgggtggccacaggaaggcagccgggcccatctctttgctcgctgcgtcgccatgggcacacaacccaaccgcggagaaagcgagtagtgcgaggtagctcttcattataccgagagggtatgctagcagaaatatatttgtagaaaagaatcttgaagggaaacacggaaaaacgagacatcgccgtttataaacatccagtcatcctcgactgcatgacaatctagagtagatgagtatcggcttgggccgactccgctgccacgaggttgacaaattgccaagtgtaccaagtgcttggcaaccatagtttcctgcaagttacgtccgggaatcttctcaccggagttggaccactgatatggatccattcaggccgagtcacaagccaaaagccacaagccaagatacaacttacggttcgatggcttgcatatgataagaaattaatttattgaagttcgaggagcccgccggataaaaggtctagcggaaaaatcatacctacgacccggatctgattagattaatcagataagatgggtgggtcttctccggctaatttggctgattttcggagctcgcttacacatactctcaggatggcctgggttcatttgagacattgctctaacgggtattctcagccggaatagctcttggttctccgagcgtacgtaccactagatagttctcgctccgaaaagaccattctgccaagcatcgtatcgttcttggggggacatccgcaggtaaataagtagacactgaactgccgtcacttgaggtatacatcttctgtctctacaattccaaatacaaacttcatacctcatttcactcgttgatatcatcatgcgtcttgttaacctcgctgctcttgcctgcgctgtgatcagtgccagcgcattcgacttcccggaatttgtccctctgcaccggcgtcaggaggccggcactccagcatatgagtgccacgccaactgcggtatgttccatatcctctatgcaaatcatgactcggactaacaggatcaggcggcgtgattgtcgatggccgtactgacgggtactgtgataccgatgaattcacgaccgagttggccgcttgcttggaatgtgcccttgagtatgacatttggcaatactacggaacctccgtgtcaaaggccgctactgcttgtggattggacgctaccccggtcgaagcatcttctaccactacatcggctagtgcaaccactgcatcggatagtgagaccactacatccgacagtgctagcgctactgagactgcggagagtgtcacttccgctgagagcactgctgcggcgaccacctctgctagtacttcgatcgcgacaacttccgtgagccccccgcgtgtttctggttctcctcgcccgtcgtcattgattccttcggccacacccactggaagctcggttggtttctcttctactcaactatggacttatagctaacttgacacagactgcttctagcactccttcctcgacccccgtctacactggtggtgctacgattaatatgggcagcggactggtgtctggtgctgttgtcggttgtctccttgcagctttcctgtaaatagtggtggtgtatagtaatacttgatggagcgaaggaaggtgtgagaaagattggtggatgctgtatattcaattctctcttgtgacaggccttgaacctgtctactgcactattgcagcaagaatcctttattaagactcgaaattaacgttctaatctaagagtctcagattgtaagcagtattttcttgaaaaaatagtcccaaacttgaagcaccgacatcaaacatacgatcaaatcccagaatgactaagacgagcgactgaaaatcatcatgatacgtaatataccactaactgcgacgatgtaaccaactcgcgacttttttagaagtccccaattcgtttttttgactaagtttggtattgatataaccttcccagtatacttaggtacacatcgttcatcctgcgagctaactaataccgatggaccgttatgaattcatctcatcactcttcccatctagtgagttaaggtctgtttccaaatctaacccacagccaaattgaactgccctttaccttcagtaacttcgaactgccacgacttcccatcatacttctgtctctttttcacggtcacggggaacattccctcaaccggacacatgttggatatggttgccgaatttactttcggtggcgcattccagagcctatcgaccgaagtaacatcgtatcgtaaggcagtcatggctactagtgccaagatctcactagtggcaaagtggcgccctgggcagattgagggagaaacaccgaatgccataaacgcgccggtgcgccggggctcctttttcttgccaccattattcccggttgttgtagtggatctcatgaaccttcgttcgttgaactcgtcagccgaatttccccaagcgctctgatctcggcccaattccttcactggcatgaagagcatggttccagaacggagaaaatatttgtccgcgaggacaacatcctgtgtcacgaaccggacggccaccattgttgaccttgtccggaggacttcttggtacaccgagaggagaagtgggcaatcgcgaaagtaccgcacataaatgatatgcgtaccgtcgggtgcggtcttgagggtgttctgctctacctcttcgcgtatctcttcgagcaattgtggtctcgagaaaagctcaaagtgaacccagaatgcagcaggaacggtatttgccagtaatcctacaatcaggggcatttccgcgtatgctatttcttcatgagtaagtccagcccccaggaatgacctatatcgcatggctactagctccgagccgtcttcatgactgccaaggtcgaaataagttttgaacgcagcacacaaagtcttgcgtgccttccaggtcttaggggcaagtatccatggcaaaatgctggacagtagtagggccacattacgttcgaattccctgcccgggtatttgaaaggttttgtagcaagttataggtaggataaactcaccagaatgtgtcttcaatgtgtctaatttttgaatggattcgaatttccatatgttgcatttgtgctgacactagtaatggtatgccgaagccaagcattcaaatcaacagtctcatagttgcccatgtcatcaatgatgggaagtaggtactgaagcattatcctgttaattctgtcaagggatctccccgcaaggacgggtccagtatcatgcacaattttagaaaggatgctcgaaccatagctttgatcacataaatggaccagcttattgcgcggagtttgacatagctgcttctgtgtgaacttcactaacggttccaacgtaatggccgttgggtgtttttgagcagcacgcatgatggcaggtgatgaagtcaaaaagagcctgaaggaaaatatattaaccccgaatattggttgatcgcgatatttttcgctgtcgaatatgctgggttagttcaaactgtacaaataatatgatcgatgactcaccacaacatgctaagatatcctgagccatgttggatgaggccaatcagatggcccacaagcggaatcgtactcgataccgagggaggctcgcgcctttgaccgtgaaacgaagtatacgatgaggatagaaccacaaccaatactacaccgataatcgccagatcatcaaagtctaacatggccaagttagttcacgatgtttgagtgaagcagagtttagggaattgtcggtgagaggtaagtgaggcaagaagcagcgctgagagtttgtgattgcccacgtcaaggccttggagtctcccaaagaggtagttgctgaccagacgacgtttcataaaataggaaaagtacatgttttcaactgagattggctaaccctcccgtcgatcgaccttcattaatttcgtgccttatacattctatttgatgctattacttagataaagttgcgtctggtaagtttatttgtactaccagtccacataaatcaccaagacgtcccagtcctctaggaaattctatgctaatgcgcatgtttagagaatcagatttgaaatggtttgttaaccaaagtgaggctaacagtacgatcggagagtgacgtggcacaccgtgacacgcatgagatagtagcccccactccctcgtttcgaacgtttggtaaaaggatagtttcagaatatatcggcgtggtagttatttttgctttggcataacaaagttatcgttgaatttgactactgagcttgtacgtcaacgccaggggtcatagatgcaagtatatctgcgagtcccgcatatcaccttgatcaaaaatctctttggccacttctcttgccttaataataataatgcaaaatgtttgctttctaggaggcgaatcatatctcaagttatcaattatctctgacgtttcatgcggtagacattgcaaatagtacagcgcatattgccactggaccataacaaagaccaaggttcccatttagggtccacaggggtcatgactgttgtctccacattaccccgcctagactaagtcagatagataaagaagataaagaccaggttgatttgactctttccttcaaagtctcttcgcagagatatttgatcaattatacattctcaatatggggggagagaccctacaagtgaagcgttcccttctgtgggagagggctctgaagaactatcatcaagatcttgccggtgataaggaattggtcaagatactcaagactagcagcctcgaggagcttcttgcggatatccccattctacggccagttaactcgtcggaaaggccactgccctgcactatggatcgactggagccaacattcaaactgttgaatgatttcttagagatactaagaaagtcatgcggcgcggagtcggcgcaaacagcgctagtatggggcagtatacgaatgattgtcacggtgggcttccttcatgagagcctacacactcttatttgaggctgactagtgtgcagctggcatctaccacagacaaaattttgcaagaagtcttcgatatgattgaagagctggccttgacaataccacatctggagtcctgcaaaatcactgtctcaatgaccacggatatggagacggcactgttgagtctttaccaagagtttatctgtttctatgcccgcactatccgtttctttcggaatttcagacaacgtaagtattgcgttctcagactcaatccggtcttcgtactaatttgagccagcgtttatgatgcgcagctcatggcccaccctccagggcgattttcaacgaacgatccaacgagttaagcgcctatctaacaatatcgagcgcgagattgagctcagtagaatgcgactcgataaccagaaataccatgtggtcctcgatttcatggcgaggttcaaatcccagtttccgaaaaatggcgatcaagtttcccaccatcttcctttcgtggaatgctcccatttctatggtagagatgatattctttgccaaatagatgaagcgctatttgtgcaaccctctgcccgctcacttcgatccttcgcgttatatggcatgggaggagtcggaaagacacagatcgcattgaagtacgccaacgcatcgcgtgaaaagttcgataatattttctggatttcagcccagaattcgataacaattgggcaaagctttcgaaatatttcaaaggtactcggtttgattgaactagacacagagctggacgaccatgccaccattctcaaagtcaaggactggctatcatccgcaagtaagctacggacacccagccctgatgggccaaaatattgaaaactaacgaacaaaaatatagagaccagctggctccttatatacgacaaccttaatgacttgagcttgatcaagcatgcttggccggcaggatatggagggtccgtcctagttaccagtcgagactcaagtgcggccttgtatcccgcctcgtcgggatgtcaagtacacgctttcgatacggataatgggaccgccgcattgctccacctactcggattggactcggagtctacatcttatcaagccgaagctaagctaatcacttcagagcttggaggtctgcctctggcgctgagccagattggcggatttatcgcccaacggcaaatgtccctgaagagttttctcggcttctacgaccgaaattcaactactgtcgatgctgagcgtccagaaagtatggattgcagtcaaacacttgcaagtgtgtgggaaatggcgctgagcggcctttcccggaatgctaaggtcctgatcatgattctatcattcctagacctcaatggtataaatgagacagatctgagaaacggcacggttctagcaaatgacgcagccgtgaggttcatgatggatgagatagagtatgtacgtggaatcctcatggataacactactaaccttaccgttagctttttagatgcccagagagacctcctccaaaggtctctcatagacaagtccagcgaaagtggagttatttccatgcatcgggttgttcagcgtgtcgtcatccgtcgaatgagcgacgaagagcgagacaaaacctttttgctcgctatagccatcgtttccgcaaacttcccagatacatacagcgcagatatcggtcaccagattgcatcctggaacgattgcaagaagaacctgacccacattgagagcattgtgagcaaagggactgagttcaagatctttgaaggggagaatcaaccgtttgcggaacttctgctccgctgttcctggtatgtttcaatattataatctcaaacattaattctctaaccaaagacaggtatctgtatgagacggagaattacagtctcgctcgttcgtatgtcgacatcgctctgcagaaatttgtggacaaagattctcttgcgtatgccagtgcagtggatcttggaggtttaatcgatgttgacatttgccatccatcggccgcgctggaggccttcgaaaaagcatacgcactacgcacatcaattcttccgagcgatgacttgtttctggctgccagccaggtcaatttaggacttgctctcactgagattggcgagtttgaaaaggctctcggctatctccaacagtcaatcgatatccggctcatgcacaacagtgacaggattggtaactcttacagtaacttggccagtttactgttgagaatgggaaagcccgacgatgccgaagctatactgaagagctgcccatcattgaaggacttttcagatgagacatttctccaaaccgggaatcctaggttctccgggtaagttctcctgtgaaggcccgaaatatatgactaacatcatgcagagatatggtattactgagcaggataaggaacgcccaagggcttcatgacgaggcactcaagtttgcatgcaaggccttagatttccgaagggaatgctccaaggagcggctcaaagtctgtgactcgctttatcaagtgtcggttcttcggcacaaaataggcgagttggagcttgctcagtaagtacaagccaatacacagcaaatgactataaatgctgacatatttcctcagacaactacttcaagagtgtatcatgatatctgaagcccttccccacgccgagggcctaggacatctcgcacgggcaagctacaagatatcgcaagttctggcagaccttggaaaacccgaggaaagtacattttatcttgagaaggcgatcgatatacgaggagagttcatgaagttggatggagactacgttgttgtgaacggaggtgcctcggatttcgaacgtctggtcccctggatgctgtggtgatctacatccgagtccaaatatgtatgcatgtcacccatgactcgaatagcgaggaatattcagaggggctggatcccacaacagatattctagcttgccgtgaattttacaaattgatcatctttgttgttcaaacttaggactttcaaaatatcatgtgacatgggactattaaggtgcgttggagggtgttcattctgggaaggcacgtgggtttggggtataaaaggacccctccccccaactcttcttctcttcttcttctcttcttcccatctctctgaccaccatctcaccgtagcccccacgagacagcgtaggcagagggtcccgtagcacatgctgcttcacctaccacgaggacatcaacattacaatgttgtggaagtccatgtaggtcagcaccacacatcaaaccgagctttctcgtggatgttcctgaagtcgtggctctcattgccacttgacgagtcctacggaatacatgaggggtgtaaatcttcgtagccgaagacgcgtaggtttgatttaattgtaagcacactggtcaccagagtagtcatggcaacggcaacccatttccacggtcttgttaagctgaccagcgaagctaggcgattgtcagtgacccaaatcaagaaaagcatcacgacatctgaagtcacaggtttgctccgacaattatgagatttgacgatagctggatggagaagccagttaaccatcgcttcttttcagtcctgggttgcatcaaaattgtatggccccaagcaccaacgcgagatgctgagattttgacaacgtctcggacgccgtccatgctctccctcagcttcgacgcctattttcgctctaatatattaacacaatatacaagccaagccatcaagccccctgactcgatctatacaacctgttcctcgagcgcagcctgctccgccaatgcttttaaagatctcttctctttttcaatcccattccgtcgctgagccgtgtcacacagttccagattcccacattcacattccccatccctgagccaccgataagtgatactccaccgtttcccgcgcggcctcatcgtcccatccgggaggggatcattttttcgcttcctaataccatgcgtccaatgtagcctcgagtcgccgctcatctgcatcatgctccgcggggtcaagtcgacctcgatgcgttcctcgccccggcggaatatcatcatcgccggtgcaccaagagataatgcgtagagctggtcatacggtccgtgtgcatctacatggggcgggatgcccgcgcctggaggatagtactgcagacagacctggtctggaggtcgctcctcagtttttgggatgagaggtttgagccactctgggaattccttgtatggaatctccgggtctatcccgaaagttttatagtcgaaggtgtagccgtagtggagtgatatccggccagggcggtcgggccattctagctcgttggcaaacaacgagatgagtcgttgctcgtgctcggcattgacaaagtcttcttgccagaaaatgccgtagggttcggtgggcaactcgcggaaattattccgatcttccatagccctttttgatcctgtcggaccttgaaggtgggaataaagtgcgtggaacctttctttgcacgtgtaattttcaaactctgattttggaatgtattaattaccggtatcaataccacacactgcatagactccaagcataatcttggaaattgtccaccataaagtgttttgagctgtattgaaaaattaccgaatccgccaagagcatcaacattggagaggtacttgtttgggattttcgacatacttgaattgaattcaatctagtatcgaagagtgttctcgatcatccggctttggccttgtatctccacagggaacgtcgattccggtaaaaggacaatgaggcaatccataagagcatcgacaaccaagaaattccttatttcagcccaatgtcccggcttaagcactccaaaattcgccaccagtccccctgaccctatactgcgactccctgctccaatcgacagagggaagaatagggcccggtagcgaggggacttctgaagggcgattctcccggtaactcgacatatcttgtagcgaaatccctggaatttgttaaccttcaggcgcgtcctactccattagggtatccactcacgtgaatacggttcaagccgacttgagacaaaaatgggtgtgctttcgcgtggcgatcgtcgtcgacgcatctgaaaagattctccatctccatctccatttgtatgcatgagaatgcccacgctgacaattccttcaacctcagaactgcctcctcatcgtgtattgcctgagacatcgttgtcgtccgagaatgagtgttgtaaaaggggccgagatatccagttgttcctttttgaaggtagaagatagttgtatagcatgggtgattattattaccgttataactgtagcgcttaacctgcgggttgaagataggtgtaggtagtgatgattgagatgagtaaagggaaagggaagagtaactaatttgcaatgaaattgaatccaagtactgctttttctttgtctgtactcgcatcatatacaagcaaaggccatgtattgacccgtgtctatccccggaaatttccgccttcttgtagcatgcggcatatccccgcctaatattatccatagtatactacttagtatctctaactcacttgttattggctccaacgaaccttcaaattggactgccaggcttcctgtggcaattaacatctatatgagacattgtaattcaggccagtctattctgaaattgactgcattaagagtcagagtgatttttcctcctccatagcaaacgccaacctgcccttactatgattctatcgtgattcaggaattgaaaagctcgaataattgatacatctccatattcatatactccgacccaacgagggacatctattcatatcaccatccaccaataaataggggcttcttgctggtttgaatggcgtcaatgcagccctgatatcgtttctttgtaatcatgcagagagccagaaatgaagctggtggcctgaggccagacaagctcctttgtttctgacggcacctacaccctcttctcctcacctcctcatctcctcttctcctcttctcaccttctcatcttctgctcttgtccatcaccagacaaaaatccagagttctctttccaatcttttccgcctctataattacatatatcattatcttgtcgatgaggttagctggcacatcttgctattcgctgaatgacggcccaaacggttagcctggtgagtctaccaaatgctagagtccttgatggatgcaaatctgataagaatgctgaacagtgtgcccctcaattatcgggctgttggggatgcatatgatggggccggcattttgatctgcgctagcgaggcgctgaacggggtaatcaggagccctccccggaggtctgccttctcctcctccgtatacgagacttctttacctcgaccatgagacctcttcccatcgaacttccatccgttactctttttgcgacctttgctttattttcgacggtcagctccttcctcgaaaaccacgcacaagtgatgtcgatccttcttcacttcacaacaagtggcgtcaacagtagccaccctcctatggctgggcctgttgcctccactgatcgccctacaactttcctccctcattggcgttgtcgtcagcgaccttgattcgatggcgaaaggtcgtcaaaccacagcagccatccaaagtattccgctacaatgccttctgcactacgaccgccaaacaaagcatattgaagcaacgaacaagtacggctaatgggcggtgatttacccgaggaggtattcttttcatcagtctcctagcacttcgcaagcaaggaagcaacatcttcagcatcaccgaggccaagaagggatctcggtacaaaggattggagaaaatcatgatacaggagacacgccagagaaaatcctttttttttgtgatatatgtaattatctatatttttcctgcaccggtcaacgaatcaggcatgggaacgttgcctatcatgacaaaaccaagaacggggtcataaagtgcccaaaaatgaagctgcacggtcttttgcacttgaaagaaccattttgagatcgaaatcattctctgctcctttcactgagcatttgagggggagattgagattcaccgtcgctcctaccgacagatagattgtcaacagtctgatgggctctcagcatagggcatgagtctcttctttgcctcccaaagtgagcagatttcgcaatatatctccgcgtggcagtgggcaactcatactaactctaccttgatatacagctagaataaacggccataacacatatccgcgcaaaggagatccttcaagccccctctacattcaatgtgggatcgtctaggaaagcttcttttgtaactcaccctctagggcatgtcgggagctcaagttcgctttcaacaagccatttggcaggtacttggaggccgtgaatctgtattccgccgactctggatgctgtatcatgtcttgacttgggtgcaagaagcgcttaagctcccgatatactttacaggtaggattgcgcatgaagtttccctggacgatctcttattcaacgtagggtgttgtggccttttttttttctataaccatgctattgtcatagccttgggtggcaggctctattgttgggtcgtcacccggtgggtgcagatcccactactagttagagtagctagttccgttcctcctcttctatcctcttctctctgtccattaccacttcaccagaatctcccttcttgtctttctcagacgagttcacctagaagtagatctctatcatatatcctgcaagttagtttattatcataaatttcaattgaaacaacggaaagctaccatcaaatggaactattgacagagcgtagttgaaagaatagcagagaaacagaatgaactagccaaacaaacctaacctaggatgtcatcaaaaactggctccagtctagcaagtgatgtcttgtacaatctgggtagaccagtatcctcaaacgtgaccgagctctgggccatatccgcaacagccctaccggacaagaatgccacaggcataccatggccattgaatcccgccgcgataaactgacccggtttaccgggaatactgccaacatgaggcaacgagtctgcactgtaccccatgactataagtgagatgaaggttagtagaaagaaaataagccatcgtatataaaagaatcgcacataccaccagcccagatatgtttgatctccgccctactatcctcccacccaaggaacgtgcgttgcatgtacccatcaaagtaatccgccgcaaccttaatcaacttcccatcatcggggttgttataccactcctcgcgatcatctttgaaaagatgcgacgccccgccgacaatgagcgacccgtcattccgggaaatctgataaatatatccctccggaccgattcggatacaatacgtaccaggcaattcctggtgaggcgcaccaggtgccgcagcgatctggctgcagatccccttgcagggaatgatagctttggaatactccggggctaaggcgctggtaaacgcgttggtcgcgaggataatcttgcgggcgttaatgacgccacgactggtagttaccggccaggatccatctgcgtttggcgtctctccgatttcagataccggtgtattggtctgcaagttcaggccgtgagaaacggcgatgcgaataagatgggaaacgagtttgtaaggccaaagatggcctgttgggaaactgaagcctcccttggcatctcggacatgcgctatcttaacgcagatatcgtcagaaataatgagagcggaaatggtagcctgaaagcccatatcgacttacatcctgggtctctgcttgagacaagtatttaacatcattcataaagtccagtccttggtcaaccagaaagtcgtagaaggctttcgccttcttaagctggtcttcatcaagatacatatcataagagcgggtaaaagtgagttcgcaatcaatgttctctttacggaccagctcttccataatcttcaagtgcgagatttcgaaccgcacgatctctgctgctgcttcgatgccatagcgttcggtgaacaaggccgttgctgaatagatatctggtctcaaatggccgcctatgcaaaaattgagtgagctggacttatatacataactcatactatgcgttatgtgtgggtcttaccattgcgcccggtggcaccggagcaaagttcccgagcctcaaccaacaccacgcgaggagctggattttgcgggttctctgcaagcaagcgataagcagccgaggctccgacatagccgccgccgataattaggatatcggcttcttttggtagttctgttgtagtttggtggttgtcgagtggatctggttgtgtccgccaaaatgattgggtataccccgctgctgggcgagggaagcatttttcgttggagttggatgacatgatgcctagatgtccgtagtttacgatgcgattcgaactccagggatatgcaaatgtgaatacaagtgcaatgcgaaaacaagaaaagtgggcgtccacgggtggtatagcaaagcgttatcggagttgggcgcgcagcctatcgcagagaccgaactatgcggggctgaaaacgaagctgattgtgcgactttgatctatagtattcttgaaactcatgatattgctaaatccctgctatgttcacctctgggaacctgctcggttcggattcgttgagctggcactatttctaggctgccgttgttgatcttcaaatgcctcgataacatcagggcagctcgattgggccttgcctgattgtctggccaaatattcagactctgttaatcgcgctttcagaagttgattccgagtcttggaatgcatagccgaatgcaagcttttggctaagccctgtcccggataggctattaagcccaaagcacctagagatgactcattagcataatcccgctagtggtgtaaatgtgcatcacaaacctgatgcagctttcgtgcccattccaatcgggccttgaacaaatcctctgattgcacccatgaaaccatctttctgggcaccttcgtagggctgtcggaagatatcagcgaatccagttgtgaacccattccgaaagttatctgaggccgcagcaactccagacttaaagtcccggatattgtcgtagtctttcacctcctcgccatagagcctgggaacagccctcaggccttcattcaccgctccaggtatgtctaccaaaacgcccttgtagtagtaggctatgatcctccccacgcttttggcggaacccccaattgcctttcccgcaactatccagtcttcatctgtctggttggttccgggagtacgtgagataccttcggatgggcttcgctcggattgatttgtaggctcgataactacaagctctggctggctctgctgatgggcacgagtgatctctttgtagggcctaataacgacgtcgcttgatgctgtgaggatatccttatacatgcctagcacagacgatgtgccgcccgtgataggatcccatcgccgggtcataatgaatatagtttttgtctcgtatctagttcgaaatgtgtattagtataggtatattgaataggatggttggatatatggtctcacgctttcaagtcccttgtatcaatgcgagaattctcaagcaagatccccgctgccattttcgacaaatttataggggtctttccgttctgttttaactgccaaacagccggctcggaatcaagaaactggcatttcattttatcgatcggtaagttgcgatggaaagatgcaacagccgcagagactccagcttcctcggtcatttcacgagcaagatcaccagctgctgttagggtatcaggatgcaggcagaaacggatagcttccgctagattttccgcgttcaaagtccggtgtggaatgggaattggtccaaccccacgggacgcgaccatgtttccccaaaatagctgactgggataagttagcaaagagataggaaaagcctgcaggaatgacatactctccaaagaatggtacaataagcgagggtcttccaaatcgtaaaccacatgctgtagtccctgctcctccatgatgtacaactgcagcgaccttctggaacagccattcgtgcggacagtcctcaaggtaaaagatctgatcgtccgattcttcttcgccgagcttactccagccacgggatataattgcacggccaccccaggacctgactgccttgacgagtgtggcagtcatggctaggggatcttcaatgacgatgctgccaaatccaatatacaccggcggaggcccgctttggagaaacgcagcaaggtctgcaggtggtgtgaagtccggaggagcgcggaagaagaagccacagacatcgatatgtgccggccagtctgttggtttaggcatcaatgtaggtgaccagcaatatgtgaatggtatcttcaaagtctctgctaaacggggaccttcggtgagcgatatagcttctaggtcgatggattttctccaatcattgataacatcgcccaagctgtttgaggtcagcctattgcatcaagtatagcagggatgtatctggttgttacccttgccatgtcagccattcgacaatcccgtaagaaagataattcgccatcttcggctctgtggttgaatatttcaaatttgccaagggatgtggaaatgatctcgtactggtccacggcatggtaaacatcatatgtagagggatgccaagtgcctgagcgcagtggatatgagcgaagcttggagggttcgcaataatagcatcggcgacaaagggcgttttcgtaacggagtcatcctcaatacaggaccgccagcatccctggagaatttcgcctaccatgacacgcttgcgttgaatgtcaccctcttgaatggatttcatctgtggtatcaagcctgggttcttcaccatgtatgccatcagctccgagggatctcccccgatagaataaaattctagaccagagtcgcgcacgaagctctcaaacacaccatgtgtcgctagtcgtacgcgatgtccatggcgctgaagctcgttgcctagtgcgacaaagggctggacgtcgcctcggctgccaacaacttggataacgatgttgagttcaaggccacattcaaaatcacccgacggctctggctgtggttgtaaatgctccgcatgtagaaatggtatcaactttgacacttccctgcccactttggagtcgagatcgatatcaattcgaccatcatcttcgcgaaattagcaagatattctcgcaaacaagacagcgatataagaccgctcttacccttgacttttgtcccgtcctgagtaaattggttgcgttcaagcgtagaaggccggcgcggtggttcttccatcgttgcagcccaatgacatcacacacgggagatctatccgatatagaatttcgtcaagaagaccgatttgacttaggtatttccaaaaccctgtgaaggatccaataatttcaaacagaaagcagtatatgaagaggagtaatcccaaaacaactgaagaccatggtacctaggtggttctgggccgcgtgggacgggtggaccctcgaccgttgatcccacgtgacgtcaaatataagccaatcataggctgttttacagaagctatatgacgtcattcctacaacgagcaaaaggtcaatactactaggaatttatgttcattctgtaagttgtagctttgtgttttgatttagggagcctgttcatctcttttaaaataacatatcctggtaatacccaaaaatcaaccctcttaaaagattagcatggcttgtacctttaccgtcaaagccaggttagtgggaactgaggattatgagtggagagctacgaaattggagtcagtgttaagaacatcccacactggtccatccagagtcaattgcacatcgacggcgcgcagaagattatccggagctgaagagcgtctggtacgctggcctcgaggcagctcctcctcggtagacatgatgattgccaaaccgttaacccgataaccttcactgaacgccggcgacaccagagaaggggcaatgcgcttggcatcgacagtaacatcaaaatcaactccagcgtatgtcttgcccctactccactgtgtagcaacgaggcaaccacgtgggactttctctttgaacctgatgtgacgtttgttgggctgtgcggcaacccattcaaactgctgcttgacttggttcatatcaaccgagtgaattgtatcatgaataagctgtgcaacctcccagagtgcgcctttttcgagtagttcatgggaggcggaagccgaggggcagtagacggcattcggaaagtagcgtgcgggaagcttcagacgagtggagtcgcgcatgtccatggttgtccaaaagctgcgaagtggctcaagcgatttggcatctggtgtgagtcccttgttacgcaaaacctgaagtcttgcttgataaatgcgttggtagagataggctgagatgagctcgaaccttgtgaacgaggtcggttcctgggcgttggggtcgattgcagcattcttgattgtaatcagctcttgaccttggaagcgcagaggataactgctgacagagggagggtctgcctcagatatgtccgtggcgttctcgtccagacaatagtccacaggtttgaaagcaagggctttctccttctggctggcggataggctgttcgttcctctaaaataagagaagatctcagggggagagatgagtgttggcggagaagagtcgcgcaattgtctgtagatctcagccagatcacgcacaagctgcataaacccagtggcatcgcagacctgatggtgaactcgaatacccagtgcaacccctccgcagccgaatcgagtgtgctggatggcgaaaataggattgtgggagacagcgcccattgttgaatgaaaaattggaagaactgcattcccagaatctggcagaaaagttaccaagatacgggctgaaaaagcagaaactgcaatactcgagagcctcctggggcactgcgcttcccaaagctcagcgccagcgcccaggctaccaatctctagagcctggctgactggattctgctgcagacggccagtcaaatgcgggtaatagtccaggaggtgcgatgcagccaccttcaagcgctcaatcgtaagaaaattgtcgcctacaaattttgctggttttctgtatacgaagatgccttcgatcgtcaacatagctggcacgatatggtccatcggtcctagactaaaaggggactcgagcgcggcgactgtggcctcattggcgcagttaagcgtgtgccgcgtagaaacgcggacttgatccagtggcatcgctgtgattggacgaagcagagacaggatagcgggggaatcaggatggataaagacgtagaagagttgacaatgatagaatatgacgaggataaaaggggatgtagatgaaggggaggtaaaagagtgaaagtttgcgctgcttgaaagcaatggggagggaatctttgccgcgttgttgggatgataaactaatttgtccccctccgagtgaacaaaattaaatacaaaggccctccggaagcaaccacagtttattctgtataaactatcaaataaaatttaaaaaaatggaatcaaagaaagcagttaaggaaagcaatccgagggtgacgcaaatatatatcgaacaaagaactggacccgtagatgactttccgacttttacaaagacaacgtggccatgtcaattgcatcgtctatttgggattaaggaaagtgcgagggaactgtcgcactttaggaagacaggtgggttgggggtataaaagggccctccccccccaactcttcttctcttcttctcttctccctatccctctcagccaccatctctccgtagcccccatgagacagcgcaggcagagggtcccgtagcacatgctgcttcacctaccacagggaccataacattaccatgtttgttatgaggtccatgtaggtctgcaccacacatcaaaccgggctttctcgtggacgttcctgaagtcgtggctctcattgccacttgacgagtcctacggaatacatgaggggtggtgatggctgtagctgaagatgcgtattctacccagattgtctattcttatcgttatattctcatgactgtctaaacggagataatatcagatgatacctgaagcgtgaaggaagcaatttgtcacatagctgggagatattctgttgaggataccaaaatacaactctggagagtattggaacgtctcatcagggctaccataatcttacatagtaatctctgaagaatgaatgtgctctaatatccaaagatcttgtgtctgattctctcacaccgatagtagctcacataagctttgcgtagacaagacatcaagcctccaaaacactccggggtgcttaagatggaactgcaggtctcatctaccactctatactacatgctaatagtagtatgtgaccgttgaatgctcgggggcggctccgaccaagagacccacttttaggcggctccgatgtggggaccatatctacttgggtatcaaatgttctaaatatttaaaggcttcatctcatgttatctcaatcccaaattagcacgatctattccttttttgtttgactagaactctacgatggccaatccctcaatcgtcattgtgcccggcgcatggcaccgtcctgcgcactaccagcacctcatcgaggagctcgcaaaggtcaactacgatgcagaggccgtgaccttgccttcggtagactccaatccaccactggccacctggaatgaagacgcgcaagctgtgcgacaagtgattatgagcaaactggacgctggaaaggacgtcatcgtgctcgcacattcatttggcggcgtcgccatgtccgaggcagccaagggtctaggaaagaaagaccgagtcgcacagggtttgaaaggcgggattatcaagctggtctacatgtgtgcgatggcgttgccgaagggccaaacccatatcggccagttggtcccgcagacgcccgaggaagaagagatggagcgtcagcgcaaggagatggaggaaaagctcggtggactagatgtgtcaccggtatggacttgagtctttgcttctatataccttcaatgctaatctgtccacaggatggagcaatcagcctcccgaaggaccgtattcacctcgtcttttataaccgttgcgagcagaaggatatcgagagggctgtggagttgctcggcacattccccgcgggcccgttgaccgttcctgccacatacaccgcgtatcgtgagatcccgagcacatacattgtctgcaaaaatgatcaggcattgcgggaaccgttccagcggagaatgattgcacaaggtgagggctgctttgaggtagaggaatgcgatgagggccattccccatttatgagtaacccaggcttcatcgtcgattgtattcggagggcagccggagagaaggtctaggcatgcgaagacgttgactaccttgtcgccctctctatgtcccttgagctttccagtaatatccttagacctgggaagcgtaccatatttgagatttccatgttttatatgatgattctcctcttttccaaatccatttgaagctagaatttaacggttgcctcatttaaggcataatcaggcatcagtcgtggcgcggaacggaaaatcaatccagccgcgtcggaaataaccagatccagcggacgcctctcttgtagttatcatgtagacacggaatgccgggagacctcaattctcccaaggcgtcaattcctaccgtgaatccaccgcggcgccaaaatacaagttgtgattcatgccggcgttccaagcggcgatgtgttgtgcagtcggacccagacggcattcccaatgcgatatgcacgaattgccagcgtttgagacgccaatgtacgtttgaattcgctatagcccagtccagtcttcctttctcgcgaaaacgacagaagcgcgactgcgaggaaaccagtgggccaacaacgcaaaatgaatcgaatgacttcgatacaacaatcgaggaaatcactggaagctcgatcaatcgattcgatgctgcatctattgctgaccaagatgttatggcagcttggctgaatcttgattatgatgagattgtcgcggatagcgccacctccttttcaaccaacctcgaaccttctaattcattcgatgcgcttcgttctgagtacatagcgcccgcagagagccaacttacggccaccacatcccaactgactcgcttgcatcgaggacagaatatccgatcagataatcaccggccaacaattaggctttcactcaacagtcccatctacctgctgaattctggagtagacgcgaagatctttggtgatcgtctcgcccggatctatgaagcaatagcaacagccagtgcatccagattcttggactacgactgcaatctctatgcgactggcagtcgctaccggttgggggacaatgactcagggagctcaaatggatccgaaactgccaggccaaccgttgatgtaaccgctatctcaccacggcttgatctttcagtatcatcgcaagcaatgtctcatgaaatttccttgataggaagtgttcggttccttgatcatttgggcggtctttatggcaatcgactgaactcggctgctcggaagaaatcagatgacaccttctatgctgtccttcgcgtattctcgatgcaatggttaccgaactcaccttcgtttgaagtgggttctccttatgatcactttgctcggaatctagaggcgggagatgactcttccttgaacgccttcactgatgcttgggtgcgggcaagatcactcctcaatgatgcgcacgacgttcggtcatttcgagtggtattggcaacactcatgttcgttgggattgttataccaactaaaataactgatagagaggatctcgtaccgaacgacttccttgacacagctctgcaaaagttatcctatttagatggacttgttacacaatactgtgcgaacgtggggccgtcatctatatatggagctcttgctgaagcaagtttaagcattatccgatggaccgcgtatattcgcgacacaggcgcagcgttagcgatggatcggcaatgcaaacttccagatctgtggggtactacaaaaggttagtattttccatatgggaatatcaaattcaggcaactaaactaaaatcgcacagtcctctcaaataaagaggccgtggcagcattggcagtctctcagaatatcttagagttggatatcaatgtccaacccatctgccggaaagcaagtgcggaaatattttgtgtctggaggcagatcataagcatcaaaacagttgctaaccagtggcattgcactatcaatgaacggtcctcgtcaatcattagagcaataaacttgagtgtggcagctgtccgtgacttcagccaatcattccaacctttcatctctcagtgcatcagaaagttcgattgtctgtccacgtctcccaggatatctcttggtaagatatactcctaccatccttgactcatcattctctcacaatgctatcatcggcatcctactgacatttatcccttagtttctctcgtgatgttttggaaccttggcattttcctattcgccgaagtatttagaaaggtgaccaaagaccttgatacctacatcgaacaagaatcaggaccaaccgtccgagaataccagcgcgaggcagcttcatgtgtggcacaagtagttgaatgtgtacacagcttgcctaccgaggaagcttttaacctccagaatggactcggcgccgaagtcccaatcaccgcttatcatgtcacaccgagcttggctgtcacgactcttcaacgggccattgagagtgtgatagacctgcaacttcgctctcgctctgatgctgatttatcagacttatcagacgacacgcagtttttgataccggatgggacctgggaccgacaaattgacattctcatgaaaggactcatctcgcttgacgttactattggcggatcacaaaccagtggtgtggccgttagagggttaatgcacaaacatggggacataatatccgagtgttggacttcggggtttgactcatgacatgcaaacgtggtggattcagcggaaagaaattggtcgatggtaaagccaagcacattccttcgatattcctaggacaagaagacgccagaagcattttggtacatccgtagaagccaggatgctcaagtctagtttgacctagctccattccggaggccagcagttcctgtaactaggattatgtaacagtttggaagtatcgggcattcaggtggaactggcaaactagtaagtaatcgatgtcgtcatccatggatgggtgcaacacaaatgtgcaggacttttggggctacagtctcttcgctggtgattggaagttcagaatcactagtacgcacacaccgttggagccctacgcgtgtatacataatagtatatttatccttagtcctttgtgacgtgattcagaatttgtcgtgaacattgccaacatcggacaactctcctctacgggtggactaggcgccccaccgcctcacccgcgtgcaaacccccgagttttcctcctaactgtgataggtcagtaataaattggacattatttaaacttttgaggcttgcgccagactgtggagaatgaaatctcttttccaaccatcaaggtgaaaagtgtatagccaagaactggaccatttattcatggcccccaacgtgccaaagtaccgtccaatcacgtagacaggtgatggataattctgctgccttgctgcatgatggcgcgtctgtgttgtcggaaagcgaacccaaggaaaaaagcttttgcatactttgtctaagcctttcaatcggcaaaaggatctctggtatgaaaaataaaagtaacatcttttacggtccatagcttttagaacatagaagcacaatttgtgtaggtcagaagcaagacgatgatgaacagggataagaatgaatcagatccaaccgacgcatgcaaccatctttcgcacactcggagcttcaagggaaagcttgtacatgtagccaagctctcctcaacggtaacccagtcttgctgattagaatttatctgatcgcaaataaggtttaatctgatcgaatttatcagatcctccaagttatctgatcatgaaaattatcagattgaaagttatctgatcaaaaaattatctgatcacgccactcggagaaatccttggaaccaggcccccacaatccatggatgtttactacggatgagcagttatctgagaccttacgaagtcgggatctcggagtaatttcctgcatactaccacagcaaggattgtatattaaaggccccacatggtacaggaaacgccaccctcgcttacacaaatgggtacgacctaaattttaatatattcgaaagaaagaggttaaaaaatacccccgccctctaatcattcattccaggcttccacaaactacctgacacttccactcatggatacggaggacacgtccaccgtcaaaggggccaccacagagcacccacagcccctggactcagaggaatcaggtattccagatggagagattcagcaagatggtgttcagattgccgacgcagtcacaaccacgtggtctcgcaagcatttgattattgcttatactaggtgagcaaccttgctataagatgttggtcctaaatgccagatttaatgtgaaaatagtatgtggctggtgtatttcgtcaacaatctcaacagcagtctcactgcaaacctctctgcttacatcacgagtgacttttcggaacactcgctactgaccgtgattgcggtggtgaccagcgtgatgggtgctgcatgtctgatgcccatcgccaaggtcctgaacctttttgatcgaactgttggattcgtgatcatgatcttgattgcaattatggggttgatcatgatggctggttgtaacaatattgcgacctactgtgctgcacaggtgggtttgcatcatcaataccctctacagggctatttcaagatcactaatgaattcataggcattttatactgttggattcactggcgctattttctgcattgacgtgataacctcagatacctcatcccttcgtgatcgaggtcttgcttatgctttcacctcctctcctagcatgatcacagcctttgctggctcccccttatcaaaccaattccatgaaaccaattggcgatgggcgtatgggacgatttgcatcattctccctatcgctgcatttcccctgattttgacctgggaaatggccaaacgaaaggccgacaagaaaggccaattgcaatacaagcagaggacaatacgaacctggacagaaagcatttggtattacactatggagtttgatggttagttgcgctctcgaatccattcctttcatctttactcaccctgtttgcgacctagtcgttggaatcttcctaatgataggcggcacgattcttttcctgacatctttcaatatcgccggcaacaccgaaggccaatggcaatcgcccaagatcattgctatgatggttgtgggattctgtgttctcgtagcattcgtcggttacgagcgatggctagctccgaagcctttcatcccattctatctactcaccgatcgcactgtcattggcgcatgtctactcgatattacctaccaggtctcctattattgctgggccagctatttcacctcctatctgcaagtcgtctacaacacaagcctgatgcaagccggttacatcagcgccattttcgatttcatggacccgatttggctgatcggctgtggctttctcatccgacacaccggtcgtttcaagtggctactctgctgcgccttgcctctttatctcctggcaagcggtctgatgatctacttccgccaaccgggtcacaacataggatatatgtgcatgtgccaaatcttcctcgcagtgggtggcggaacatttattctgatcgagcaggtttctgttcttgctgcggcctcgcatgaggactatgccgccatgttggcacttctcagcacgtttgggaacatcggtggcgcggtgggcagtagtgtttccggcgccatctggacgaatacactccccggcaagctacgccagaatctgcctgccgacttgaaggaccagtgggaggatatatacgagtcgttggacgtacagctcagttatgcggttggttcgcctgctcgtattgctatccagaatgcgtatgcattcagccagcgaaacatgatgattgccggtactgcggtgatgggactttcaattatctgggtgctcatgatgaggaacattaaagtacagtctaacaaggatctttccaaggtccttttctagacggagaatacggggctcggaagaagatacatagactggtggactttctttctcaaaccgatccaatccataatggatcgagcccagttcagggtagctggaattaattggttacggtattctacatatattgcaacgttaagatggctttcacgcatttcatttcaaccagcggatcattatgacatgagaatttttcacttctcctgggagatgccgccaaacgcgccatgaacttaacactcgtatatcggctctcaaaaccagcttgaattaccgagcttacacattaacaataactaatgtggacttctacagactagtcgatttgaattgccgtaggctccataaatcaagattcccatcgatctaaagactagtatctactctactcggccctcaattttcgagaaatactccatgactccgtacaaaccctcattactcacctcccttttcatctgaacttcctgggtacgtagatatccttactttttgttcttcgtgttgttaccaaatttggtatgtgcgaaactttggatagaaaacatgagctcgagagatgtttgtctgccaaggggtagatacatcggaaaccagtattgtcaatattatgctatgtcattttgtaaacctcactctcacatgaatccatcggttatcttgatctctttcagcttgcgaggccttctaggcaacccgtttatatgcccatcatgttcatcgttgttgccagtctggtatttccgaacacacaggtactctagcccaggtggtaagcagtttatcagtctaaaccttttcctttccttgtaaggcccactgcgaacaccagcggcggagtataacagaaagtctatatccaagctcacccgttttagggccacaaattctttcagtgacccggcttgtgtccatatcaattgataaaattcacgttctgcgtctctgattccgcgttcaaatggacccccgtgtcgattgaaatgatcgtctccccattctccccctccgatgtcctcgtcgaatggatcaatctcatatgtcaagctaacatcaagaatctccagtgtcttcttgtgtgcacaaagcgcttttataaatgctttggggctgaagatagagacgctgccacacattctcgccgtgaaattcgtaagtatcttgcaagaccatatcagattcgcaaagtagagagagctagctgccgtacaagagagagagatcttgctgatattagaacttttttctttgaattcaagttttccatcatcaccctccttgtctccatgactgcggacggactcaattgacgggagagtgtcaaaaagcctcaagcagcgttcaaagtccaatgagaaacgaaaaccagcataatgtggaacagttgtctcggagaggtggagactacgaagattgcgaagatatgacttgttttcgggactggcattggcttggcgaaggagcttgacaagcgggaagtccattatattgctgtagctccggccacggggttggtccaccttcatcgtcacaatgttcggcgataccacaatcagaatggtgaccaaggcttggatgatgaatgcttcaccgccgacattgcgtctgtccacctgattagatggtcactcggagacgaagatcgaatgagattctcacctatgaacttttgctctttttttcataagcatattaaccactcgatccccttgcaggcttgtaaacccgccgtttctgagcgctttgcgcacgagacctatctcctcgttgctcaaatcccgctgaaatttgacttcctcgtggaccgtaaaccagccgtttactggtggtctagtggaatcgactttgcgcacgtaatgacccaaaataggtcgtttcaagatatccataatcatggctaatggcttgtcggtattttctgagcagatttgaattcggtaatacttcccgcgcgctaccatatcgcacagagagtgaagagttcgacattgtcttgatagagcagccacgtcatagattgaaagcaggtatgagataatccgatggagaacctcaaggggtagactgagaaatgacatgatttctgtactgtcaatatggaagggggggagggggaagggggttatttcaactacatttgtacggctttgcctctcctggtaaggtggctattacctaggatttgtcttggcattttgagaatttctgttgacaacaaagaagacgaagagaatgacgaaaaacaaatttgtcatgtcgtgatgccccaaaaatctgtcgttggccccgctggatctctccgcggaatgactttcctatcctggtgcgcggggatgtatattaaactccttccactccaacttgaaccattttaataacttcagtttcaaaatgactcaaatcttcctgtgagtggctttattcctgataaagcatgatccatgctttgctaactcaaattctagtaccggtgcaacgggctacattgggggcgaagtcctccacgctttacagcatgcgcatcctgattacgaggttgccgccttgatcagagatgaggaaaaggccggcaaagttttggctgcatttcctaaggtccgtgtagttcttgcggatttggacaatgtggaaatcattgagaaagaatcacgcaaagccgatattgtcatccgtgggtcaatttacatctggtagcctgatgtatcactaaccttctccatttagacgctgctagtaacaagcatctcgaaagcgtgaaagcgatcgcaaatggcctggccggacgtcaaaatggtatgtcgtctactgcttcaatatcttctttcgggtttgatcgttaattgaagtaaaatgcagcctattacatccaagttaccggggctagcgttctgtcaggtcctgaagttgatagcaactcatatggtgagccctcggatcaaatcgttgatgatttggataacgctgccgatctccgagacataattcgggcgtacaaagatcgtcgggtggtggataactacattctcgacttgggatcaggtggtcccaaaaccgccattcttttccctcctatcatattcggcactggtaacggtcccgtgaatcaacgtagcatccaggttccctcattggcccgggccgctttgctacaacatgttggtctataccttggcagaggactaagtcgatggggcattgttcacatcgctgatctggcggatctctttgtcaaattggtggagcatgctgtcaacgccactcccagtcctatctggaatgggaacggccttttctttgtggaaaacggtttcgaggttagttcatggcctaatatgtcacttctccgcgctaaccttcttgtttttctttcagagcttcaaagatgtcgctttggtgatcgccaaagaggcgcatagcctcggttacattgattcgcctgattcagtgcaatccatgaatctcgatgaggccaatgtagttatacccaatggagctgtgttcctgggtaccaatggtcaaggccgagcttcacgggcaagaaagctgttaggatggcaaccagatggcgagagcttccaaagcgccacgcgggagacaatcatcactgaagcagcacagctgcgatgatttctcaagcattgattgcaagttcaatccatgttattcagccaaaatgctatcattgatttcacattctttacgtaggaccagcgtaatattagataagaaataaagaaattttataacctttgcgaaaatattacgatggcatatataatctgtctcggaattctactggattactccgtactgatctttgagttctcatagatgactttgacaaaaatggtggaactaaaaagggactatatcaattgaaaaaccactagccaccatcaggctgtaatcaacccagataaccctcctccttcaaaatgcatatagcttcaacagcaattttatatccaaataagttgctaatcatcagcctggaggaacgaaaagtcagtgtaccgccccgccgccttgtctgaccgcctcgaaatttgccggactttactttttttcatttacgatttttatcaccgccaaacagccctctttctcatcacaatatattgctttctttgactcttctccacctcgtcgtcctcaatcatcatggcgactctggcggagaagcttgagaagattaagtctcccaagctgcagaaccagcatcacgtaagtttccctgttgcataccacccaatgaattgacactaacattcatgaacagaccgctgtggtgctctctgcagttgaggatactctccgtgatcaaaaagcagacttctcgcccaccgcatattttgctgctcttcttgcactgctctcgcagtcactgtccgcatcccagggtattgtcaacaaggacctagcgacatccgttgtctaccttctcgacatcacaaccgtttacgtccccgccccgatcctttgctccaaattttcccagatcctcgaaggtcttgcacctgcgctttctctccccgaggtcgaagccccgctcctgcgtccttcaattggctgtcttgagtctctgctcattgcccaggattctgcatcatggaatctcccgcacacacaggtcggaccgcgacgcgcaatggcaggtctactgagtctatcggttgaccaccgcccaaaggtacggaaacgtgcccaggaggctcttgtcaaggttctcaaggcgcccccaccgagcccgtctctggaccacccgggtgcggatatgtgcgcccagtctgcgatgaagactctgggggatagcatcacagccgcccacaagcaaaagaaaggtcgtcatgatgctcaggccaacaaccatgagccccttatcattcactcgttgcagctgatcaagaccattgcctcggcgtcaggtggctggcccagcaagaagatcgaaccgctcagcgaacttctgatgaacgcttcccgctctagcaatgagtacatcactatgggtgcctttgaggtatttgaggtcattttcgaaggaatggcggatgaattctcgtcttcaaagctgccccgtcttttggatgctatctccgaactcaaacctgcgcagaatgactcccagcttctccccccttggattgcagtgctctcgcgtggttacgatgtggccgcacaaatcactcccgaggatactttcgagaagttgccggatctgttcactttgatttctggattcatggcttcgccttccagcaacatccgcgtttccgcatcagagtgtctgatctcattcctacacaactgtatccctaacagtgttattgtggatccatctgtgtatgacgagaagactttagagaagttgtctcgtgcagccattgatcttctttcggtgaagtaccaggctgcttggaaagaggtattcaatgtttgctctgccctcttcgattgcttcaagtggcgatcaagcccatatctggtcaagattgtctccaccatcggtgaactgcgcagcaatggcggcttccacggcaagaaggaagccgacgccgtcatcagcagtgctatcgaggccatgggccccgaggcagtattggagattcttcccctcaacattatcgagcagaaggctggtcagcccggccgtgtctggatgctgcccattatgcgcgatagcgtgaccaacacgaacctccgccacttccgtaccgagctcgttcccctgagtgaggcactgtaccagaaggtagtggacttcggtgccgctgagaagtctgtggaagtgaagatcttcgaaaccctcgtccaacagacctggggtacccttcccggctactgcgagctgccccttgatcttgaggaggcatttgaccagacattcgcggagctgctgtctaacgttctgtacaagcagaccgaattgcgtctcgatgtctgccgtgctttgcagaaccttgttgagtctaaccaggctatcttgtctgtcgaaaacgatgaggacgatctgatcttgcaacgacgtatcaccaaggccgctgcaaagaagaacctcattcatcttggcggtcttgcgagcaatctgctggctgtattgttcaacgtctacagtcagacccttcctcactaccgcggctacatcctgcagtgtatcaatgcctacttgagcatcacccctgaaaatgtaagttgccttcagtcgtatgcaaatttacacgactaacacccttcataggagctaaacgaaactttcacccgcgttacttcgatgcttgaatcttctttgattaccgagcaagagacagcaaccaagcagagtgcttcggctcagaacccgtccgacaagatgccaccgacctcccacactctgattgacctcgttatcgcaatgtcaatctacctccctcgctccagcttcagtggcttgtttgccatggcggcggctatcctcaacagcacatcccccaacccggatcagcaactgattaagaaggcctacaagttgattccccgacttgcaacgaccgagactggtcgcgctgccctccaggagcgtagtggagagttgcaggctctcatgcttgccaccaccgataccacccctgcatctggccgtcgcgaccgtatgctcgctatcaccgagataatcaatcatctgcctacctcggacctgcatttcatcccggccatcctgtccgaggtggttctgggctgcaaggaaagcaatgagaaggcacgcacagcggcctttgacctgctgattctcttggccaagcgcacaaccgattcagagcgtaaccctcccggcactctcatccgcagatctcttgtgcccggtgtggcggacgattccccggatgcgcctgctaccctcgaggagttcttcacaatggtctcggccggtctggctggctcggctcctcacatggtcggcgccaccgtcactgcgctttcgcgtctgttcttcgacttccagaaacaactccagccggagatgctcaaggaactcgttgagaccgttgagctcttccttacctccaacaaccgtgagatcgtccgctccgtccttggcttcgtcaaggttgccgtcgtcgttctccccgacgaatctctacgcccccgtctcagcaccatggtccccagcctcatggcctggaacaaggagcacaagggccgtctccgtagcaaggtgaagggcatcatcgaccgccttgtgcgccgattcggtgcccctcttctggaggctattgtcggcgaggaagaccgcaagcttatagtcaacatccgcaaagcccgtgagcgcagtaagcgcaagaagagagagggtgccgaaggcgaagacgaagacgaagaggagaaggcctccaagccccaagccggcaacgccttcgacaaggccgtctacggctctgactcggactcctccgacaactcggacgacggcgacagcgacgtcgacgtcgacaacgtcgcccaaatcaagggccgcaactccaagaaaaaagcaggccagagcacccagtacatccgcgagatgtcccccgaggacaatcccctcgatctgctcggctcgaacgccctggccagcatctccaccaccaagcccagccagcgcttcctcaacacaggcccgggctcgaagaagaagcagcgcaatgccaaggtcgacgccgacggccgtcttgtcctcggcgatgacggcgatatcgtcgacgacgtcgagatgtccggtgctggtgacggtggcgtgaacgcctacctcgctgccgtcagcggacccgatgctgtccgccgtggccagagaggcaaggtgaagatgggccagtcgtcgaagaagaacgcaggcgatagcatggatgtcgacgaggacgacctgaagcaggacctgcgcgcttccggagccggtcagagctccggccgtcgtggtcttggtgcgcccaagacttccggtgcgtctggcggtggtcgcgttgagaagcgtcgcaatccaggcaacgctcctcgcggtggtaaccgctcgggatggggcaagaagagataaactatttactctacggtgaatcgtatattttcttgccggtacggatactgtaagtggagaagagggtggcatatagcagatcccggagttatcgttctgagttcccttgtttttgatttttgatttttttgtttctgccatctggtcttcggtccctgtcgtgcttggttagtgttgacgttctcataataccctccgctgtggtgattccgttgactctgggctttttctgtttcgatgcagagttattgactccgtgtttttcatgatatgattacgattctattcaaaagtttctattaggtcaatggacatagatattgttttttgtgtgtggtctatagcatagatgagtagctttatatttgacaccatcacgaatcatccgatatcacatgacactgatgaaatgctactaaatgtacaactacagctagttcaaataccagaacccaaatgcaatgattttatcatatcctcatttgcaaagcagttatcatgcaaaaaaaagtgtatcgaacatatcaatcagaacttcatgaacgcgagccagccaaccaggcagctcagcagtatttcccacagcatccatcgctcgctccgagaagtaaaagtagacgtagatgtagagcgcgacgcaaaggggacagacaacaagaagctgcaagcttagaccagacggcatcacatccatccaagcgcatagcgtcgacagcttcctttcctcgcagtatacagcagacaggacagtacagtacagtagtagcagcccactgcgagcatccgaatccagccaaaactcctgccgatgcaatttgcaattccaaacgacgaccgtccgtatccgcacggcgcgaaatcaaatcgacaccgtcgctcatcggaggtcatcgagcagtttatgtcctaacgcccctttgttctttttccttttccttttcaacactcggtctttcaacggtatcaacccgggagatagagaaagcgataagtcgacagaccagaccagatcaaacacacaacaagcacgtggtgacaatgcgataattagaacagaatctccccgctgtgctcgggctcgaaaccgagcgcttggagttcgtcgtagcgcttcttgtcgcctgttttcctctttgcgtcctctttcttcttcagctcgaagacttcttcgaatggggctctggtcagtgtgggcgggatatcgtcttcgcggtcaaggtcctgtgtggaattgagaatgcgtgagcggggttcctaccagtataccttaacttgcagcagggattgaggagatcataccacttcgcctagcaggagcacgttctctccacgaacaatgaatatgccacgtgagacatcggcgtacagctgtccggcgtagacgcgctctatagtatcctggaaaacaaggttcgctagaagatagcatgtcagataaaagagcgagacagattcaagagtagtgcgactggcataccgaactggtcccagcttctgagaacgccgataagtttgcggccgtcgcgaaggatgagtacaagtttctctgcgattgcgtcagtcttctttctctcccttgttcttcagctctaggccgcttgagtgcagctgcacatactatctgttagatcgagcagctgtgcggcggtcgtgaacatctgcgggggtaattgcggcgggccgcctgttggctgggggcctgctgggccgagggcattctgggtgaattgttggttttgctgcggggtgcgagaggccggggcagggctttcgtttagagataggcgctccatggcgttgtctgtgttggattggcggagggaaaatcggaaagcggtgtggaggggtagggagggaggcgggaggaggctgatacagagagattcaggaattggaggtggagcttctcattctgtttctgatcattcgcgatggagggatcgaggtcgcaaaggccgtcatcacgggcggtgagtttgtcttgtttgctcggggctgctctatacattttggtttttgatattcttctgagacataacatactctatggaagaaaaaaatacacttgccagttctaagtctgaagaaaagtacacgctatacaaaagcgaaagggggaatatccaaaaaaaaaatcaaaaaccaaaaaccaaaacgcgtctatatctacaacaccccgacacccctctgctgccccctcatcctctcttcccgccgcttactatacggcgcacagtacggctcatccgcagatccaatactagccctaaccccatcctgcgagcgatggtaggcaggactcgacggcgcaggcggcaactgcatagccttgaactgcgcatctgtgataacgcgcatgccatacagataccgcatgagctcgaaatccggccgactgcccgcaagcgtctggccaagacagtagtggtcagcagcgacgtggtcgagcatacgatcccacgccgagggaaagtctccagacaggggtcgaaccgcgtcatcgctagagcggatcgactcgccgtcctcgagaaccggcgacgacacggggtccgaaatcccgtccacaaacttggtattcggacacagcggacaccgcgctgacggcggcgtcgggtacgagcgaaagtgactgacgacgtgggcgcgccactcggcgctgtcggcgaaggacttgtggcagtccagcatgtggaagaggcacgcgtatgtgcgctgctcggcgcttgtgctcgtgctggctgttagagaggggggtcttgacggcgagagagcggggtcggtggttaacggtgtcgggtcaccgagaacgtagatcccgagcccatctgtgctggtatctccctgtgcggagtcaaccccagtcccgggcctggtgtcaactgatgatattgacggggacggggatgcgctcgacaagtccggcacggcgggtgaagaggacatggcggtgacgacgacgcccggttgctttcgcttaggctgtctttgcgacagggcgggggtcctacttgaagcggtgctgctggcggtcgaactcacgctgatactgacgctgcgggtagaagacgatcggcgaaggtcgcgatctctatggcggtctctattgcgtgaatagaggagctggtcgaggtcgcctcgaccagagtcccgatggtcctgggggcttgtgggcttgcgctccgacatgctcgatgcaaaagacggggaggtctagtacacggggtggatacggctggatcgtgtcagagtcaggttacccggggttacatagcaataggagtagccttcgacgggtagagttagaggtatgtataggattagggaggagaggagaggagtaagtaatacggatgaggggaacgggatagaacgggagatacatacaccccaaggatccgatataagatcagcagaataccttcagatctgcactttttcagcatgcatgacatccatggccgttctgcgcgtacaatgtagacaagggtatatagaaatgggctgaagtgggggtgcggacttttggatttttttttctgaatcttagggcggggcaattggggctagttgggctataaggattcagatggctatactatatacactatcacctggatttgtgtatatttctttacctgtctttgttggggataggtctgagatacaatgcacgggcggctgtctgcaggttgttttcgttggatagaggattacgctttgggaagtacaacataggaagtacaagatgtattcgccatttgtggatataagattatataaaagatcttcatagtctggacctagaggaacatcgaatatctaggctccatggatctacgttagtattcttcacaagtacgaagagcagggttgagaaggaatctagatcgttggacgtgttctagacaaagattcagttgacatgtgaatgtatctttctgattctattcttggagataatggaatagagttgcaatattgtttcagattcgatgtcaaagacatccgaagtattcagataatactaggctgtacagcatacatcgtatgtagatgccaactatacggccaagtgaattgcggggagatatcacatgcaaataagccaaaaccgatacaaagaattaagagtaaatgtcttgatttgctcacaatgtgaggaattaagtaagtgaagagaagtgaagtaaaggaacaggttcagaagtaaataagaccacaggcctcgggagaggagaatgacatagaaaagtaggtctttcgacacgaattttgaactcgaagtaaaaaaagaaaatctccagaggagtgaccagccaggggtaaaaaaagatcccaatccgtctatttggtggaagcgccagagataaaatcaacaaacccaatccgacaccgttgatgcccgcaagccaggtaaaaatgcacaagtctatatcgtttcgtggcgcgcataacataagttttcaaggcataaaaggttgcaaagaagatgagttagaaccggtctgccaggtccccgccagcaacggaattggtggctgacgagttcatggaagaaaatccggccgcggggttgagcatgtcctgcaccgcaaccttgggaatctggggcacgggcaacttgcgctgtgtgccgtcgggtttcgacatgatatcggagatggttgggcccatgtgcccctggttggggctgtaataattgggcccttctggttgcggctccatgggcgcgagatcaggggtgtgctggagagacaggtggcgaatcgaaggcagatgcagctcgctggcaccaagagggcgcagacggggcgagtgtgcaggagtagccaatggagtgtgatcaggggtaggggagagagaatcgtgggagaaggtaggagaaggagcggtggagttgggagagttgggacgagagcgcttgacacggtggccatagccatcatcgtcatcgttggaatgcgaacgggtcatgttctgcgaaatcgcatatgcggagagcgaagggaggccacggctagtgccgtgatgacgggagccgaaaatctggtgtccccgcgagccgtggaagcccatgtggtcatcacgctctacttgcgacgccgctgtagccaggagattgatatccattccggaggaagcacgctccgcggtgcgggagtaagggcccaaattcgagcgcatgtggttggcgtagttggagaaggagtggggaggggagacatccggagatccgacctgcgatactggcgcggagcgagtgataggcttgctaggaggtggcatcatgttggaagcattcattccggagtcttggcctgcggcggccgccgcccccnnnnnnnnnnnnnnnnnnnggcccgcggccgccgccaggtgctgagccttgttactgcggcgcgagttggggttgttgtggatgcgcgaatggcgagttagctcgtctgatcgactgaagcgtttcgtgcagccggggaactggcaggcgtgtggcttctcgccggtgtgcgtgcggatgtgtctcgtctggtgctccaggcggtggaacgcacggtcgcaaaggggacacttgtacggccggggcaggtcctggcggatctcctcggtcgcggggcgcgcccccttcataagcggcggtaacaagctcactgaagaagccattgaatctccgctcgaggatgtgtcggattcgtggggattaagtagatttgagaatcccactgaagaacccggcggtggcatgtgaatccgtgcggcggattgatgggtgatactgaaaggaggaccgagaacgggtttatcgcaggggtcccgagctaaggtcgatcagatacccggattgggatgggaaggtcgatcgggaatcggagtgcggcgggaagagttctgatagctcgggttggttataaaccacgtagtcgagtagtgcagaagcgggagcaagagggaagaagaagggggaaaaagggaacctggagacgacgatctggggagtcacagataatatagggaatggagggggaagggagaaatcgggggagaaggggcagtgtcggaatcggacttggagaaaagaaaattctgaaaaaacgcaaagcaaaaaaacgaaaaagaaaagaataaaataaaataaaatacgtccaggtaaaaatgtaaaaatggagagtgtgggggagaagaaggggagacatggggcaaaagaggaaaaatacaaaaaccggaaattcccaaaggggaaatgggaaactaaaagaaataaaaaagaaataaaaaaagaaaaaaggacggtccttactggatgtacatcaacctggctatgtactatttaggatagataactgaattaactaataactattccaatataatcatattccgctactctctaatattcttatagtattgctgtggtatactaactacgtaactgcataaaacaaaaatgtggggactcgcattttgctgaagaaccgtgtggcgtgaggtgcgtgtccctatccggctatcgcgcctctaacaattcttatcagaacatggggggagatatcagcgctatctcgggatgacgagcaaaagacagtggatgagaaaagaaatggtggcatgcggagagccgatgacgagcagaacccggggtcgccagtactcaatataaaatgatagatactccgtgcttccgtgctccatagcaggtacggagtacatagacatagtcctgcgaaacccagggccaaagtctgggggtgacggtcattctaggcccgaccagtccaggcccatgtacaatggatgtacaatggagatcctggggaccatctgatcccgtcacggagtgacgatagcgaggatcatcgatgatgtcgaccgaaacgaaacgcccaagggttaattctggtaatcatttagtcatgcgaacacaacccagtcaacaggtcatccaggcatccagcgcgaagacgagatacgaaaatgattcgggttgttcattgctcaagacttcatcatccggaggaatcatccccgaaccctatatatcgaaaccctgggatcaaccctgggatcgtctgctcaggttcgccgacaattcccccggattttggggtaagatatgacgaatttatatacggagtacatataattgtatatttctttaaccgactgatatattgattgtggaacgatagaaccaacaccgctgataggcgcggatcatccaattattgatagccccgatgcagctgccatgcagccgcaaagccgcgtatctctagatgccagtgtcagcccctgcacaatgcgcactcggctgtattccttgcgcaatcagacggcggtatccctgactgccaagacgcctaagtatagaccccgggggttgatttcctgaatctcacatcagggtattaaccggggtctggggtaccggttcaagataatattaattacgcttaacaggtattgaatattctcctatcagcgatcgagatatcttcacgcttcgctaagaaggcaactataatacaagattacatactttcgcccgaagttcccccggcttaatggaagaaaagggccgaggtgcgggataaacgggacggggcaaagatacgcccactcggcaaggccgtcccgccgagagagtccggtttgcgctggaaggcgttatctttgggtccggcatagcgttactccgcgattctattgtatgtgtaggcatattgatttgatagatacacatacatatacactaaactttacactacaatacatatcaggggatactccatcttgcagggtctagtggcggatcctaacggaagttttacccccgggcaaattcactcgatccccacagttcacgatggctaaattccttggcaaattaggaccagcacacaaacgcaaacctgaaagcaaagcggaaagataacggagtatcagggcccagatgcctatgttgtatgccggcccgactaccgagctggtactttttgatcggggatctagaaatcgcacgaatccctgccaggtttaagaaaatacaaggtaaaatgagctcacaatatacccgacggtacggagcacactgccgcaacctggagttctccatttttctccacggggaataatggcgccattctggtcaaaggccggactcggagtggcaataatagcggtcttttgttattcttcatctcaagaagcaggtaccgtctcgaagcaatgacccgccttttgccgaatttgcgacgtgtacggagtgcatttgctaggatcgtgaaactaatgagggtttcggtttcaggtgacgaattcagatctatcagttgatgtactcctcgtgcacctgctggaaatcggaatattcacagaacagatatccggattcaaagttccgacatatattcctgaatccttccccagaactcgtctcacctgccccgattctcacccagatccgcaaacctacgaactcgatcctacctgtttagtacgtagataagtgccaggtgggggacaccgaaaccggcagttccaatcgccgacagtcctaaatcgcaatatcacgacagaacctcatcctccggtcttgaaccggtctgcgccccagaaaatccaacctattttttagaatgatcgacaaagtttatcaagccgatatacccggtgatgaacactccaaaacacacagataagcatacaacatatacacacatactccataagtcatcctaccccacaatctccaagtgatagccatggggagagacccgaaaccgtagaatcgatctgcgatgacatctcaatccaaatctgccttgatcaccgcgatcgccttgaatacgatcatccgatatcgctgtcgtcatgcgctcctccacacaaggtcaaggtcgatcgtcacgccatccggggagacgggagactggcaatctacggtagtggtatgtaagctggatattagacaatggaattacctatattgtacatctagcttgcaagtatgtgggactgtattgatgctccatgggaattcaatcgggattcgtcactcaagcattccccttcccacttttccttgcccactatgctgatcaatcccattattctggcatgcagacccgcgcacagggcgggtacgtcgatcctggatggggggaaaaagcaaaactagtcccaccaccgaaaggggacgaggtagagagaaatggaaatagaaatgtaaataacaacggcaagggaaaagaaagtgaagggaatgagtatacgcaatagtaaagctcgattcgggcgtggagatcctccggactccctccgttatcagttggagcctcgttcagttgtacgcggggaagtcctctttccatccgattcagccctcagggtacctattttaggcaaaatatcggcgaactagtgatatctatttctattccccgcacccacacatatcgttatgtaagatcactagtagtgggtgaggggagatgaaatacttttatagttattatattaccctattattcataccctctggaatactttccagggtaaggcagtaagtagcgtacgagtccgagtctggacgcgcccgtccctttcagcccacacccccttgctacataagctcagcagttgctactggctgtacgacatccaagttccaacacggtgtgagtcatgacgtgacgtgctcacggcccagctggggaataaccaagttggaagctgaaagcgaaagcgcgtaggaaagtcaaaaagaaaagtgacaggccaactggcaacaagggatcggctcttgttttgcgctccgtttccaatcgcgctgtcttttgtctgaaacccctatcgagaggtgtcattggtcgagacaagatggagttaatttagttacctagttacgttatacgttgcaaagggaaggcgatctgatacttcaatatataagtatggtacagttgtatgccattgtgtctcaaggtgacatttctttatgcttggcaggtctcgatgcgggggagtagtttcacaatggagaatccggggtagggttggcttgagtaacattccacaaaacccaggaatgctaggaggtcattgcgggtgcggttactctgtggaatatacagcggggtgtagactacataggtttcccaaacacacatgctaaagaaagtgcaaccctaatcagctcggaggttttgccagcgcttacctcacatcctatcaccactcactctccttattgccccaactccggacgatcagcgctccacaccttctagaacaaactacctcgcagcacccaatcagcgtcacgaatggcctcacactgatatcaccctatgcggggccgctattccgcgatcaggccattggtggaaagacggtcgattacactatcttacaatctctgtcctattatctggagaacatgtgatattctggggaatagatagcgaaacgaagagaaaagagaaagtcgaggcggggaaaaagggcacgataccgcgtccagttcccggtgaagccccggacacccctccaattccaacatcccacgtcgagggggagaacgaaaaaattttctcttccaactccactgagcgatttatcgtcatttcttaccccatattcgcctaacgttggataatgcaacccactcgcggatgcggttcacaatgcccctgtcgcaagatccacattgggcacaggtgttgtgtgtacggagtaccgtcttgaaggcgctataaccaggtaccatatgcaggagatcagttagtctgagatgaggcagatcctagcttggatttgcattccgtaaggcactagagaaacaggggtaagggaaaacaaaggtgcggagtacgctgtggctaccataacgggcgcataccccgagctaattaagcgaattcgagctccaaaccagcgcgactctcgctggcacgtgtacctatgatattatcctttgttagatccttgactattggaaacgggatcaaaagtataactgcgggagctccggactcttgtcttccctattgggagtatcataaagcgggggggtctagatctgcacggacaggatagttagtttgtagcttgtggatttcacatgtgaatgcgcgaatcgtatgttttgatctcgttggcttcgagcttggaatgcgggatgtggaggtctgataagagtaagagttacaggaatgcgcccatatgcgcccataggtgcatgactgccttggttttgctgtgcatgccttgcattgtgcaagtgttagctacggagtaccttcgggagtaacgaggcgatggcgtcattgaaggggggccatgtgttttctccagatttggtacggagcgcattgataagggattggacgtattcaacacgtcgtctctgatctgggaagggctatcttactaaggatgtggtatgtggatgacgacagagctcatagcctagatcatgcaggtaccacaacatcagtccatagaccatagggctagctggctggacagcgacaaccgggtgatctcggaggacgacatggtgacattctcgcaggtttagggcatccagttgcggggcttagtgccgatatgggaatctcccctccgctttacatattaggaaggtctgccatggcttggctctccattttcgcctatagacggagctgtgtactttgtgggggatagtgcgagactctatacagcactactccgataccctcgatggcaaatttggcaaattcaaggaaatcaaattttcacggagcaaccgctgagttgagtatgtaaccgcaattcaaaaaggggctcggtgagacttcaatttccttttccccgctggagcctcccgatttacgcaactcgggcgagattctttcggcatcgccgtgccgattcgggctctttggtcgctttgcctggccgccgtgccggtttttgtctgacgccggacacgcgtattgcagtggtactctccacactgtccacacctattcttatcgtcccatacggtaagtgccgtaccagcgttggtgcctctccttttgagaaccatgaccgctggaatgccgccacaccccgagattcctccgaggctcggaagttgggagtctggggtgagccgtgggatgatctgcatgagtagcgaatgcaggtaatccactagggtctcccccgtctaatcgcattgcatttctctgcattctattctggtggatggagtcctgcgtactccgcaagcctcgggatgggagagcctcgggatagcgggatttcttcggatattgggaggtaattcttgtatcctgcttctccgggttttgtatacccagtctactccgcatgtagcggtgaggccccagtgtttcaagtctgataggtaggttgtggagatcgatgaaaatttgctgtctgtatttgcctcttgaggaaatatcaaatttaacaacgcaactattgaaagcaaattcgatggtgtcgaataccgtctaaatatactagccaatatccaaacttggagggtccaacgtaactaatgcgcaacgctaccaatttcatgaatgcatgctcgtttgatattaacgaaaataagcattctactgatgtcatttataaccagtcacctcttggcttctataagcaactttttttgtagccctaatcttaacaatttgccctatcaaaaccctaatctggcgtcctcattctatatcgagactcgaccaaaagcatgagcatatagtggtaatccaattggcatcagatagatgtccattccatattgagattcggacgcatcagtctatgacacgtcggctggtaagtttctgctagaagtctttatttccaagtattatcttctcttcttctcactcaactgatacatggcgttctgctctttgtttccgctcatcccatttcttataccatgccttctaaactacgttagtcaatccccccgaatgttgtaaagggggtgctggacgctacccaaagatccctcatacggattcttgcagaggccaaggcctcaggctagatgaggcgcaacttgaatatatgccgcctcaagctagctagtcagtattttctccgctataaggagaattatgagcgatcataaagatcatactaggtatgtcatgcaaatatctcccttccctctgtccaaatctaattctataaacagtataacgcagcattcttgcagagtacccctccataaccacggatatactgtacagcgatgatggggtgactgaaggacctctacacgcacagaggtacaggcttgatgggacaccagcttcctcccccgagcaccgatctaggggcctggtgccacaaatatccctcaagtaccccgggccaagcccgaataggcactggtcgtcgggactcctcatactttctcttgtagcggtggtataacttgccgactgcccaaccggaggcgacatccacgatgctcgccacccaacttggagccttcgcctcctctacaaggatccgtacaagggatctttgtgtggcatccaggactcccttcacagcatccggggggatcgactaacgtagcttggcggacatggtataagaacgtggatgagcggaaacaagaaagcagaccgtcatgtatcagctggggacccgaggaggagaagagagaaaggaagagacggagactcgagggaatttactgttaggactagctaccagcgtatcctgaaaatggaggttcgaattagagtggaggtccccagcgtaggtcatgcaattcagtagactaatcgctaaggttctaaatctcatgtgcgcggtgtatatatacccctagcgcttacttagcaagtacgtcggcccatacaggccagttgtataagtgaccctcggggtcgtaacattacccccctcctttgtgagctgcgtcctcgaagctcttggcatttcctttgagaggcacttctttaaatgtgcgttctttatctcagtatagcgacctcttcgccagaaaatgcgctataatagtaactcctaacttcctcttctaccctccgctatatccaactataacccttaggtcttcactgggaatcctgctgcggcctggtatatacaatgtataaatcggatcagcgctaatcatatatatatctgtatatcttacacgggatctcagggtactaaatatacctattacataagccttcggtaggtttatattatggtatagaggtcctacttcttcgtatagggcgttactaacctattaggttaatctatacctagatacgattgtaaatcgggctatcctagtaccttctacgattagatctcagtaatatactcgaaaagacctagttagctatttctgtagtacgcggctggtacttatataatctatctcctataggcttataccccctaatatacctacccttaggctatcactgctactagctaggtagttaccccttcctccggctcctctactatcttctctataggcccctatatcttacttgatatactcctagcggtccgttataccttagatataggctcctatatagaatactattatagcctaggtagtaatcctaggatttacaggaagtatagtgatataggaaggggattatcgaccttcgaccctctaggtagcgatatatcctttactataatacttaggccttatttctatatatctttagttaatagcctacctatagtagtggctataacgcctctatatactatattgtccctaggctatttatactagactcttagccctacctcctatacctactattatataccttctgtattatattcctaccgatatatactgcttcttacagtatcttcgcggtcttaacttatcttcttcttctttataggttacccccttttagcttttataggtagtcttacgcgctcttcttttttaaactgatctaatatagtagtttcttctatatacacctaaggttcctatatattcttagtatctctatagcctttctatttaactaggtactctgcccctttatagcggcttttaaggatatattctataatatannnnnnnnnnnnnnnnnnnnncttactattatatctaagtagactattatctagccttatattctaggctgtgccttctaggtagccgccctagccctattagtctatttctataagtttcttttacactaaggtatctcttatctataccttatatataaagtcccccctaaacaaaaaacatttgtgcagaggcggccatttctggcctcaaagggggccgaaagtggcctcctcggcacagttcttccgcacacgcactttcggtcccagagccacgcgctcctcgcctgccccttgtaacgtgcaccgtcacgttcttgttcgggtcatgttggtacctgggcgcgtggctccccttcccctgccctcgagccccgctcctgctttccatcgacttctagccacctccgggcctgctccttgagcgctaccatgacacctccgttttgtgaggtcgccaaaaatggcacactccatcccaggctcattggtcgctggggcaatggggtccatgactataaagctgccaacagtccctcctcactctcctacctagccctcctctcacctatcctttgccagtccctccctcagcgcgtgcctcacagccgttcgtcatccccgttgatttgtctacctgcctggagcggcttcgcgcacatcttagttttcccaaacgcagcatgagcgacgttgcagatctatcctctgcgaccgacagtgacacttccggggtgtctttccagcctgacatcgatgcgaccgatgactccgattccggggaagcctcaaattcaaccgagctgacaactccggaacccacctgtcttcctgataatcgtagcaggccttccacccgtccaaaacgacccgtgccccgtccagcggacgctggtgttctgcccgatttcagtgatgacccggatgacgacacagacgaggacattgcaaacgtaccacttgattatgggcgctcagaacaaaccaaggttcggggtcgacgaatagaaaagcgctgggacaagtgagcatttattcagacctacgcaattgggaggcgattactgatgtgaggcgtaggtactgccgagtgaaggctgctcaggctggtgcgctgttgaaatgggatgacccagtggaggcactgcgcgaggttactcctaatgacgtgcatcgttttttcaactactgcatgaagctgaagtatggcgaaggcggtcgtcatctgaagggaacatcgaaagcgagcgccctgaaagctgattggaaaggatttcggggttactatcggagaattacacggaccaggataactgccgaagatagcgaagagatcaatgcggtaagttattcctcttagtctgacgctcggagctgactgggttctagggcattcggaaactcatcgataagttcgacctcgatacacaagaacggggcaaggagccggtgtacgtccaagacttgactgaattgaacgagacgattctccgaactcaggaaagacgatttcattttggatacgagcgaatccagctctgtctcttcaacatgctcggtatttataccgtgaaccgtctgcatgctcttctttcgctacagttccaccatctacgtttctccatacaagataatccggacgggggccctcccgtacttttggtggagatcaaatcggagcacacaaagcgattcctcggaacttcccaaatgtatgtatcgtgcgttgaacccgggtaatgatgatcccaatattaacactacttcttagtaacaattttcctttccctaaaatcatcaacgatccgtcgcttgtcttcagccctcatacattcatattcggtatacttctttggctccaagccttcgaagtccctacgctttcctccatggagcgccttcgaaagctgttcgtccaaggtggccgacaacagatggaactacccttgaagcgcgaagtcgaaggctattatgtcttctgcaagacagacgtaatcaatggacgtgcggttcttcaatggaaccagccgatgaccgatggcgccatgtctgggcgtctgagaaatctaggggagatccacggcctccttcagtcaatgttcgcccatcgttttcgctatggagggggaaagatgttaaacgaaagcagcgcggtcagcgaagcacagcaaaatctgatcataaaacacgctgacactcgcactttcttgaatcattatcttccacgacacatcgacaccgatatgcagaacgttatgaacggccgcgaatctaacaagtctctgatgcgcgctatcacccggatgagtaggtggattgacaagagacgccctcgacacctcacttcggagcaacgagcgtcccttcgcgaacatccagaatatgtcgaggccactcggcgaatgaaggagcaagccgaggagtgcaaatacgatcccagtgcagcgatgcaatcgcgattagagaaattgacacgcgaaacctccaatacattcggccggttggaaagagcactgagacggaaggtgcgccatgagttcgaccgcaaacaggccatcatagacattgagcggcagctctcaggggctgctgttgatgacgaagaggcgaagaaggtacttcaagtagaagaccagatgctaccggagcagattgatcttcttgagaaattattcacatggcctacctctcaatccctggaggcggagtggcaaagaaggaacgctgccgtggctacgatctcccgatactgtggtttccttgaaggtgggccattgcgtgggcgacgtaaacgggctgcaccaagtgacgggttcgatgaagaacagaccagcgtgttaccagagccagccaagaagagttgcagctctccggagccttcgcagcaggatattcttcttgtgaaagccaaaaattatatcaaaaaggccaagaagccccgccgatgttttcaatgttatggcgacaccgaacttcccattcatcgccgcacgcagaaatatagcgaatataagtcgactctacgacactttcgagagaagcacttgcaggatcgaaggtgtcatatgtgtgacgaagatctgctacatgagatgcatcttcgcaggcatgcagaagaggttcatcgcctcagtactgaacggaattactacgccaaagaagacacgggatcggacattgataccgattaatcgggaggcttgcaggttttctgtcaaatttaagaactctatcctttttttctttgcttggccgtttccagtcttcgagttaaacgtccaccctccctgtcttcggcagcagtctggccctcccatgtagccttacacaatagtgatgcaccataaacgccagcaagttacacgtcattcttataagctagtggctccaggaactaaccaaaattccccggagctttagggctgctagcaggatatcataattaagcaaaagcccctttgggtggaagagattccaatttaggctagaagaatcccgtctgttcgcctcttcctagcattgcgtttccctatttcctggctgcagagtaccgttcccaggagattgcggaacgggacatggagaagagtaatccccagagtatacaaactcacagcgacgaccgaagacttcctcatcaatactctcgatcatcgctggctcaagggcctttcttggaaaagaaccttaaaaggcctggtgaattgagaactgcttttatttttaccaacgaaaaatgaacgacatcagattgcaggactctgcgcaattgttagggattggaacaatctttgtctaaaagacggcaacttaattatgatatgcaaccgcattatgtagagagtattcagagatagaaagatatcaaggcggttcaatagtaagatagtagagagagcacagattttcttcgatattctttttacagaagaggattcctctggctctttatagttatcggctaggccctggctctgctttcagtcaccgtctagcgtccgcagcgctgttatattgtcgcccaatgaaagctactgcggagacccgctcctacagcaagctggtaaggaagtaaaaccaatcctcactgggacaacgtggctgtctagctgagaaccgtcatctaatatgggcgactgcgaggtctcacacaaatacgggacactcacgctctatttcccagcgctcccagcgccccactcagatcgcgctaagctgaattgggtcggggaaagccattgttttctgggacatgatctgggaaacctttgcaagcaacaaatcatgcatcctctccagacgcgccaattcattctttgctacacaacaacgtggaataccacaatattagtttccactttgcatgtgtctctgtacatgtacaatgaatctccgaactgggccctagtctctactcgggactacacgtggctccagaatgggtcccgtgactttctaggtaccgctgaagtatgattggctctgttgtccttgtagaattgcactctggaccacagccacattttagcgcctgctcccctctttctttcgcctctccacgggaaaatgcatgtatgaaaggctcgcaagaagctatgtagagtgccaacctcgcgcttacaatgtccaagtcaagttctagtttccgtgacatatcatgccttgagatacagttacaatgcaggccgaaagatttaggtcagttaaaggagtctcatgcagtagcaatgtacgttcttggaccccgcattcactttggcgcctcggcaaagacttgggaacgcaccgcctgggaactctccatcctcttttcatttttatgcgttgcgtaagtcaccaaaagggaagaagataacatgggggccaacgcagcatctacaacggtccaagatgaagctgctcatcaatccaacgaagggaggagcagaggggaagagctttcatctaggacacgcgcgttctggagccgagagacgtgagtatgtcagtcttgaaatcgaagatggatgctgactgcagatttaaaagttttactggttccgcaatcttcaacctacttgccttcgccccacccgccggnnnnnnnnnnnnnnnnnnnnnnnnnnnnnnnnnnnnnnnnnnnnnnnnnnnnnnnnnnnnnnnnnnnnnnnnnnnnnnnnnnnnnnnnnnnnnnnnnnnnnnnnnnnnnnnnnnnnnnnnnnnnnnnnnnnnnnnnnnnnnnnnnnnnnnnnnnnnnnnnnnnnnnnnnnnnnnnnnnnnnnnnnnnnnnnnnnnnnnnnnnnnnnnnnnnnnnnnnnnnnnnnnnnnnnnnnnnnnnnnnnnnnnnnnnnnnnnnnnnnnnnnnnnnnnnnnnnnnnnnnnnnnnnnnnnnnnnnnnnnnnnnnnnnnnnnnnnnnnnnnnnnnnnnnnnnnnnnnnnnnnnnnnnnnnnnnnnnnnnnnnnnnnnnnnnnnnnnnnnnnnnnnnnnnnnnnnnnnnnnnnnnnnnnnnnnnnnnnnnnnnnnnnnnnnnnnnnnnnnnnnnnnnnnnnnnnnnnnnnnnnnnnnnnnnnnnnnnnnnnnnnnnnnnnnnnnnnnnnnnnnnnnnnnnnnnnnnnnnnnnnnnnnnnnnnnnnnnnnnnnnnnnnnnnnnnnnnnnnnnnnnnnnnnnnnnnnnnnnnnnnnnnnnnnnnnnnnnnnnnnnnnnnnnnnnnnnnnnnnnnnnnnnnnnnnnnnnnnnnnnnnnnnnnnnnnnnnnnnnnnnnnnnnnnnnnnnnnnnnnnnnnnnnnnnnnnnnnnnnnnnnnnnnnnnnnnnnnnnnnnnnnnnnnnnnnnnnnnnnnnnnnnnnnnnnnnnnnnnnnnnnnnnnnnnnnnnnnnnnnnnnnnnnnnnnnnnnnnnnnnnnnnnnnnnnnnnnnnnnnnnnnnnnnnnnnnnnnnnnnnnnnnnnnnnnnnnnnnnnnnnnnnnnnnnnnnnnnnnnnnnnnnnnnnnnnnnnnnnnnnnnnnnnnnnnnnnnnnnnnnnnnnnnnnnnnnnnnnnnnnnnnnnnnnnnnnnnnnnnnnnnnnnnnnnnnnnnnnnnnnnnnnnnnnnnnnnnnnnnnnnnnnnnnnnnnnnnnnnnnnnnnnnnnnnnnnnnnnnnnnnnnnnnnnnnnnnnnnnnnnnnnnnnnnnnnnnnnnnnnnnnnnnnnnnnnnnnnnnnnnnnnnnnnnnnnnnnnnnnnnnnnnnnnnnnnnnnnnnnnnnnnnnnnnnnnnnnnnnnnnnnnnnnnnnnnnnnnnnnnnnnnnnnnnnnnnnnnnnnnnnnnnnnnnnnnnnnnnnnnnnnnnnnnnnnnnnnnnnnnnnnnnnnnnnnnnnnnnnnnnnnnnnnnnnnnnnnnnnnnnnnnnnnnnnnnnnnnnnnnnnnnnnnnnnnnnnnnnnnnnnnnnnnnnnnnnnnnnnnnnnnnnnnnnnnnnnnnnnnnnnnnnnnnnnnnnnnnnnnnnnnnnnnnnnnnnnnnnnnnnnnnnnnnnnnnnnnnnnnnnnnnnnnnnnnnnnnnnnnnnnnnnnnnnnnnnnnnnnnnnnnnnnnnnnnnnnnnnnnnnnnnnnnnnnnnnnnnnnnnnnnnnnnnnnnnnnnnnnnnnnnnnnnnnnnnnnnnnnnnnnnnnnnnnnnnnnnnnnnnnnnnnnnnnnnnnnnnnnnnnnnnnnnnnnnnnnnnnnnnnnnnnnnnnnnnnnnnnnnnnnnnnnnnnnnnnnnnnnnnnnnnnnnnnnnnnnnnnnnnnnnnnnnnnnnnnnnnnnnnnnnnnnnnnnnnnnnnnnnnnnnnnnnnnnnnnnnnnnnnnnnnnnnnnnnnnnnnnnnnnnnnnnnnnnnnnnnnnnnnnnnnnnnnnnnnnnnnnnnnnnnnnnnnnnnnnnnnnnnnnnnnnnnnnnnnnnnnnnnnnnnnnnnnnnnnnnnnnnnnnnnnnnnnnnnnnnnnnnnnnnnnnnnnnnnnnnnnnnnnnnnnnnnnnnnnnnnnnnnnnnnnnnnnnnnnnnnnnnnnnnnnnnnnnnnnnnnnnnnnnnnnnnnnnnnnnnnnnnnnnnnnnnnnnnnnnnnnnnnnnnnnnnnnnnnnnnnnnnnnnnnnnnnnnnnnnnnnnnnnnnnnnnnnnnnnnnnnnnnnnnnnnnnnnnnnnnnnnnnnnnnnnnnnnnnnnnnnnnnnnnnnnnnnnnnnnnnnnnnnnnnnnnnnnnnnnnnnnnnnnnnnnnnnnnnnnnnnnnnnnnnnnnnnnnnnnnnnnnnnnnnnnnnnnnnnnnnnnnnnnnnnnnnnnnnnnnnnnnnnnnnnnnnnnnnnnnnnnnnnnnnnnnnnnnnnnnnnnnnnnnnnnnnnnnnnnnnnnnnnnnnnnnnnnnnnnnnnnnnnnnnnnnnnnnnnnnnnnnnnnnnnnnnnnnnnnnnnnnnnnnnnnnnnnnnnnnnnnnnnnnnnnnnnnnnnnnnnnnnnnnnnnnnnnnnnnnnnnnnnnnnnnnnnnnnnnnnnnnnnnnnnnnnnnnnnnnnnnnnnnnnnnnnnnnnnnnnnnnnnnnnnnnnnnnnnnnnnnnnnnnnnnnnnnnnnnnnnnnnnnnnnnnnnnnnnnnnnnnnnnnnnnnnnnnnnnnnnnnnnnnnnnnnnnnnnnnnnnnnnnnnnnnnnnnnnnnnnnnnnnnnnnnnnnnnnnnnnnnnnnnnnnnnnnnnnnnnnnnnnnnnnnnnnnnnnnnnnnnnnnnnnnnnnnnnnnnnnnnnnnnnnnnnnnnnnnnnnnnnnnnnnnnnnnnnnnnnnnnnnnnnnnnnnnnnnnnnnnnnnnnnnnnnnnnnnnnnnnnnnnnnnnnnnnnnnnnnnnnnnnnnnnnnnnnnnnnnnnnnnnnnnnnnnnnnnnnnnnnnnnnnnnnnnnnnnnnnnnnnnnnnnnnnnnnnnnnnnnnnnnnnnnnnnnnnnnnnnnnnnnnnnnnnnnnnnnnnnnnnnnnnnnnnnnnnnnnnnnnnnnnnnnnnnnnnnnnnnnnnnnnnnnnnnnnnnnnnnnnnnnnnnnnnnnnnnnnnnnnnnnnnnnnnnnnnnnnnnnnnnnnnnnnnnnnnnnnnnnnnnnnnnnnnnnnnnnnnnnnnnnnnnnnnnnnnnnnnnnnnnnnnnnnnnnnnnnnnnnnnnnnnnnnnnnnnnnnnnnnnnnnnnnnnnnnnnnnnnnnnnnnnnnnnnnnnnnnnnnnnnnnnnnnnnnnnnnnnnnnnnnnnnnnnnnnnnnnnnnnnnnnnnnnnnnnnnnnnnnnnnnnnnnnnnnnnnnnnnnnnnnnnnnnnnnnnnnnnnnnnnnnnnnnnnnnnnnnnnnnnnnnnnnnnnnnnnnnnnnnnnnnnnnnnnnnnnnnnnnnnnnnnnnnnnnnnnnnnnnnnnnnnnnnnnnnnnnnnnnnnnnnnnnnnnnnnnnnnnnnnnnnnnnnnnnnnnnnnnnnnnnnnnnnnnnnnnnnnnnnnnnnnnnnnnnnnnnnnnnnnnnnnnnnnnnnnnnnnnnnnnnnnnnnnnnnnnnnnnnnnnnnnnnnnnnnnnnnnnnnnnnnnnnnnnnnnnnnnnnnnnnnnnnnnnnnnnnnnnnnnnnnnnnnnnnnnnnnnnnnnnnnnnnnnnnnnnnnnnnnnnnnnnnnnnnnnnnnnnnnnnnnnnnnnnnnnnnnnnnnnnnnnnnnnnnnnnnnnnnnnnnnnnnnnnnnnnnnnnnnnnnnnnnnnnnnnnnnnnnnnnnnnnnnnnnnnnnnnnnnnnnnnnnnnnnnnnnnnnnnnnnnnnnnnnnnnnnnnnnnnnnnnnnnnnnnnnnnnnnnnnnnnnnnnnnnnnnnnnnnnnnnnnnnnnnnnnnnnnnnnnnnnnnnnnnnnnnnnnnnnnnnnnnnnnnnnnnnnnnnnnnnnnnnnnnnnnnnnnnnnnnnnnnnnnnnnnnnnnnnnnnnnnnnnnnnnnnnnnnnnnnnnnnnnnnnnnnnnnnnnnnnnnnnnnnnnnnnnnnnnnnnnnnnnnnnnnnntatccagatgacaagtctagtatggtcggatacgttaacgtgattgactgtgattttgatccacacgacccggaaaatgagtgttcagagcactacgatggatcgctcaggaattgtctgacatctgtcttccagtttgctctgtcttgtgagaatctgaatactggagaacaacaatggggagactgggggatggaacgtcctgggaaagtgatttatacagatggacattcttcactcgtcgaggaggaagacgttttcctttgtccgtccgattacgatcttttctctcgttcctgctatcctagcgagccgagaaaagagacgatcacggagtctcagtatcatgagcttcagagatctatcatctaggatagtcaagtaacttgtgtttgatttgtaacatcacaaatgactggtccatcacaaacttcgtatttcaaactggatcattcgtatatttagtgcaaaaatatacatgttgtgatagaaattgtttagatacttatcggcagactaactgagttcttcaagctcgagatcagccatgtaaatctctcccacgtggctctccagagtttccagagcatggcggacctcctgagcctgggcattccacataacgctagcctccggattgtgagtccatttattgcgcatttgctcaatcgcggtgttaacaaacctgcgacccgtctctagcattttattcgttctctgtttgaaaaaccggtcccaacagtctgcaaggtcgacgtccttgcccttctgtgctttatatgcctttgctgcgcggttcaattcactgcgaatgccgtcgttgaccattttgaaccgttctaagactctcggcatgttttggtagttgtagaccgcaatagtctacagtagaattcgaaatcagttttaactctacactcttgcgacttgattcgcgaactctaatccgaaacacactagctcatatttggaataacgttcgatccatgacttccaaaaatagacattgtattttacataacgcgggtaggactctgccttgtgtatattactcgtaaattccatacaatggtatttctctgccataccgcccactccagacaggaggcatcttcacccgtctatctctctggaatctcacaatgacctcacaaaatagctccgagactcccaccatccaagctacatctcatccgcgacataatagagagccagtcactgagcaaagctaaaatggccgaagaagcagaatgcagcaagttcacaatcataaatattcgcagaaacttacaacagttcggcagcatccacgcacccccaactcgcataggtcggaaaccaaccacaacaccgctaataatagacgcgctctgcgaccacctgtcggaaaaccgggcctgtacctcgatgagatgtctgtcttcctctaggatgagtctcgcacgatgaccacaacatctagcatcagaagagccccagtagccaaaggttggtctaaaaagacggcccgacagcatgcaaaagagcataatgccgatttgcgagaactttatctccataacttgttggaatttcagtcgtatcatcaagtttatatggatgaatctggatgtggtaagagggctgggtttcggcggacaggctggtcaccacttggcgtagcccctttacaggtatcgcagttacatcgcgaccagcgatatcagagtctacctacgtatacgcaggacgggatcgtcccctcgcgtgtatttcgcggtgcaactgacagcgctgtcttcgaaggctttttagctcagcttcttcagcactgcggacgatggccggagccttaatctgatgtggttatggataatgcgtcattccaacactcagagcgggtctcgcagatgtgcgcggagggggggggcgtgaaactggtatatctgccactctagtcgccgggcttgaatctgatcgaggagttttttgctgagctgaaaagctttatcaaacgtaactggagtcactacaagtggatcccgatcaagggtatgatgtttttcttgcttggtgtattgacacggtcggtgcaaagcaagagagtgctagaggccactttcgacacaggcttgaggatagacgtctgcgaaacttgaacaaattaactatgactttagccagatagaagaggtgatacagtatagtatttccggacatcggtgtcaccccctacactcttccgttgttccccactaaactactttcgaagatttctcagccgcacttgttttggtgatgctacataagttaccggattatcgtattagcgagtcaaatgtttactacctataaggcgagaagctgcaacctgagtgccccacgtcaacctttccatccctcatatggctgacttggttggcactcccactgtggccccgtgaagatcaattccgacgagttaggcagaccgcttttagtaaatgctttcgacttgacgagctcctcaagcacaaacgtaaagacactgccacccatgactgggccatatttcagacctagcagcagccaggtcttgaagccgaggtgagctagaaggggtactccccggttgttcgctcgcccaacctaggcggagagcaagctgatttacattttcatgtgtattcttgagacaaggctccatggtttctttggaaaataatactgatatatcattagttgatgataattctgaagctgatgattggacaaaagatctatgacccacaagctttcgtgacatctcctattgaaacgtatcgtaatagaacaaggggcactaattcgggggctcttctcgtgattgggctcgccgtgcgttgctgccaacacctggttggccacctccccctgtccccgcaacttgatatgaacttgaaggagcgcttttttgatctacttacaaggacacttcccctccaaatctgcttgaggctagttctatatgaccacgagctactccagacgcgaacttaagtcagtttatcttggatactcattcttcttgataatgtctactctttacggaagcgattcctccaaggaaccaaatgcctacgactactgcaatgatgcaactgctttgcctttacgccatcttcaaatgagcgaaagtatctccgcgcccaacacgttctcaaactttgcacatatacacccttcgcctataccatttgagacaaacttttgccttccccagttgtcagcttatccgtgggctccttatttgacaatgccgaaatgttcgctcgagatgactgtcggtgcttacgcaaacccttctacattcagtagtcaggctgtaaatagcgcgttgtccgacacctggtctacaaataatatgttgacgagagatgctcaagatctgtccgcggagagcactgaaccccttggaagcaggtatgtctccaatttatcctttcatggcaaatcgccaactgcctcgtcctaggaatataaaaagaaacaacgaattcaagtgtggttggaagaattgtaccagctctggaggattcgcatctaaatcctctctcatgcgacatattgaatcgctgcacgtttctccacgtggcttcgcatgccctcattgcagaaaatcctttaacaggaaggatcagctccaggcacacagaagcattgtacatgttggccgggactaactggcgcgtctcaaacgcaggggtagtgcgtcataacatgagttgaagattgttcagtactgcaaatttattatgctagagagggactagcagccaaacaatgtaccgcacaagtaaaatcgaaattggctttaatattcaatgaaaatcgcagtgaataacagtagccacaacaagaaaaagcatctttgtctaccagggtcagttctctgtgtaaacaatgcagctttctttttgatgtcaaaggtgtgtgagcgaaggctgtgtgtgacaaatagcccaagcaagatatgagagaatgaaagaagatcttgccagattgttaggattcccttttgtttgatctgtttgcacgatggattctatcggttttttacaagaaattgcggtactacaacaatgactcattatgcttaccagggaatacaatacagccctacatggattaacaggggaagagctagacttagattggcgtgtctccacttaaggtccgggaattaaatcagaagagtttagagttaaaactgatttcgaattccactatagcaaatcccagtcagtcatgtagctttcattttgtgttgtgacgcaacctacatcgcgtattagagtcaatgccttgcgaggatcctcatcctggaccatccccggccactttaatggatttcctggaactggatttaagctccaaagctaaacatgatttgttttaatacttgtccatggtgagtttgcagcggaaagagatgatacttacatcacctttgatcacattgatactctgtcggagcagtcggaatacttccttattggatttgcttccaaactgttccatgacgcgatcaataggacgtttcactagcccttcttgcgacattctggggatttgttctatctacttcccctggatttgacaacacgcggccattttgagctaacgaatggttgtgggaatgcggctgagccctcggagaaactcaacccttcatacagatggtgcttcattctggcatataacatatcctttttctttcctttattggtatctcaatggttacgcgaagccctctcatttggcccttagtcaaccacgttcatgctcgcaactaacacagcggacgggcgaagacatgcgttgatacaataccggtgggagaaacgacttctttacaaacgacttatccgccccactaaatgctagccatgctcacacctgctcagtgagcgggtgagatgatttgcgggtgaaattctgggggatgctgggaaatacatgtgaccatgttccctggcagcttggtgtttcgggaagacccatttgaaaaatgcgggggctcaagttacagtagtattcgaaatcagatttacctctacactcttagactttcattcccgaatcctgatctaaaacacgctaatcaaaatacagtatagacgtcgacccccttgttccaagcatagatcttgtatcttacataacgtagtggaacggcaccgactgtattttccatgaagattgctatacgcgggctctcttctctggtttctcccaggcaaacgctttttactctaccgtaactttctgagcatcatctaaagtgagactcatcatgtggccccgaaacttcgccctcacaatggcatcttctccgcgatataattgagagccagtcactaaccacatcctaaacggccgaagaagccgaatgcaaaaaagtcatgatcatgaatgttcgtagaagcatgcggcatttcggaagcgtccgcgactttaaccccaagctcgaatagaccagaggctggctgtgcctcaatgagatggttgcctgtctttgagaatattcagaacgccgtagagtttattagcatattccacagaatctagggccatacaaactatcatcttctccagagcccttctttcaaaaagatattagaaagcagaggaaggaaagaaaattgacattttgacatctgctatacacgaaatcctatgaaagagatctgccctgacgcgtggcccaaggcaagtaaactgccatttgtcgcggaacaactaggccgataaccaggaggaagccataatatattttttcccatctagctttatccactgcttttgctcgatgaggatgtcttgattcctatgaactgaattggaaacacgcttttcacagcagaactgaatgtgaaggtcgcccaagttagtgattagatatgaaccatcctcagaaaattcaagataatcgatgtatccgttgacattaagcgtcttctctagggcacccgtcgcagggtcccagagctttacagtcttatcccaagaaccagaggctagcagtcgtccgtcgggcgagaaggccactgactccaccgattttgaatggccctcgagagtctgttccagagtatgctgcaacgcgtccgtcgctgggtcccagagccgtacagtcctatcagtagagccagaggctagtagccggccgtcgggcgagaaggccactgaatcaactagacacgaatggccattgagagtccactttcgcagccccgtcgttggatcccagagtcgtacagtcttgtcccaagagccagaggctagcagctggccgtccggtgagaagaccactgaattaactggagctaagtggccctcgagagtctgctccagcgcgcccgtatttaggtgccagagctgtatagcccaattactcgagccagaggctatgagccggctatcaggtgagaaggccactgacttgactagacctgaatcgtgtttgagagtacgttgtagcgcgccagtcgccgggtcccagagccgtacagtcctatcagtagagccagaggctagcatccggccgtcgggcgagaaggctactgagttgaccggacctgggtggcattcgagggtctgctgcagcgcacccgtttccgggtcccagagccgtatagtcttatcccaagagccagaggctagcagttggccgtcgggcgagaagaccactgagtcaatcggtcctgagtggccctcaagggtctgctgcagcgcgccagtcgccggatcccagaactgtatagtccaattactagagccagaggctagtagctggctattaggcgaaaaggctactgaatcgaccggacttgagtggccctcgagaatctgtagctctggactccaggtttcctgtacctgtggtagccgagaacaccaattgggtaggtatgtcttaaaatatcttcgaattatcgcctttctcggtgtaaacataagtccggagcagtaaagttgaaggggtgcaacctcggctatctggcggcttttctgcatgaagcgctttgcgtcatgcagaaattcggatattggggaatcaccggtgtcctatacttgttaagttaattttattgtgtgtgacaactttcataggaactcacagctgagactctttgtaatagactaatgctccccaaaacatcagatacatagcctaggatgctcattgattccacccagtgcaaaaaatgctccttcagaaataacagtgccttagatatcataaaatgtaggtccttactccgcacgaggtgatgcacccaatagcgacaggagtattgtaactctgcgctgatagagttgtggatagtctcgggactaatctccgcacatgttgtcccatcacttggtagaccacatatattctttctcagatcgtcacatataccaaggcaacgtgtagtcaacttctgttgtgtctcttcctcatctacccagaaaggagtttcgtctcgcatctctagatcaagaaggaagtcccgaaatgatagatgaaaggtgcgtaatggtaaattaatatcctctggtacactcaaaactgagtgtagcgatttcagcctgaggctaacccgcctctcagggagaccaattagtcttgaaagcgaggtaactggtagtggactttcaagcatcacgatcgcaccaatgacagtttgaaattcctcgaccagttgtttttcctgtttcttgctctgtcctttaagaagtcgatttaacacaggaagatacgtccctttgaattttgatccatcactccgatgtgtgagaatctctgccagactatcgaccggatcccattgagggtcctcaaatatgcggcacacggtagcagcaaagataaatagtggtactgataatgcaatgagagcctgtaaatctctgtctccaggccagtcaattggtagaggctgaatcttccgaatctgtccaagtctgtgattcaagaagagcgatatatcatgtgttgtcacagcctcgggaatctgatgaagagcgaggtcccggtagtcatcatttttcatctccgaaaaccctagacgaatagggagttctggtcgactggtcaagaagatccgtaagcccagagcatttgaatgctgtagatgaggtagtaattggagtatggctcgtatgtcatcgtcttgttcacattcgtccaatgcgtctatcacgattaccacggtccgtatcagatgattggattgttctaatttcctgattggtcgaagtagtagattgtcgaattgttgcttaagtgacttcatcccaatgtcgggctcgtcatagatcgcttcttgaaggccaggtattagttgagagatgttcttcgccatttgtcttgacacagtgggaaacagcttcattgcattccctctatcagcctcgcccctcctgaaaaaaaagcttgctcctagcaaattttcctgtttgaagtgtttggccactgtgcgggagacggtcgatttccctgtcccagccatcccctttaaccagaagatacattttccctgtggtgacatagcccattccgtaatgttattgagaaggtcagtcctagttcctagaaggcattcatcttcatgccggtccatataagagtcgaactcagccccatgcgcaataggtaacttgtccagagggtctgcattcgatcaataaagtcccccgagttgaattttgctataatgtacctgcgttgagactgaactgagcattgattgtgccattattgatggctgtttgcattccagaattatggtcatgaaaagatgtcgtagacgccatgattatgataacaccatagcattgttcggtattcaggaggaacatatgggcggggtagtagtaatagtggggtagcctcgacctatcgtcatgtgatgcctcattctccatttggcggatggggatttcaaactgcgcgcgagctagttaatctcacttcattttacgtgatccagcatatacattatttctattagatgtcaaattagtgtagacgaaggctgtgtgacgaagataccaagcaaggaaggcaagggcagaaggaaatcctaatgatctggaagtttgatctgcttacattcgagaacttccatcagcttccaccgatcattacgatactagaacgatgacgcattaattgttactagtggttaccatacagtcctacaggggaatgtctaaaattatactggcgtgcttcaagctagggttcgggaatgaaagcctaagagtgtagaggtaaatctgatttcgaatatcactgtactgccagctgggaaaataacagacgttataaatctaaagctcgattgcatgacccaagttatctcacatccatagcttagatacttcggtctactgaaagactctgcaagagggctgatcaacgatgtaatattgtgtcatgtttcatgaagaggacaagcacagcagttttaaggcaaaatacacgctgatcaaaatttgcagggatgaaatctgttctgagagggcgaggaatatgacacgtcttgattaacagcagatagccacatttgctgctgatatagcaagtatatttatttatcccatattcgtggccaggatgctgtcaaagtcaagaaatttgaggggcatctagattattaattgtatgagtatttccaataaatttcatagcagctcaccatttgacttgttacaatacagacacacacacacacacacacaattttgttacaatacagacgcgctcgaaatcagtttcatctctttactgtcttcaattcttttttgaactctattttgcataataccttaccatataaggttagcctgtccctgacccacatctcaggcagtatctcagtacagtaatgaatgattgcctaaaaatagcggttgtatcattgttgtattctccccaccctgtctagaaccagtcacttacaaacaaaccaaacaagccaaacagactagttaacaagagatttgcttgttgtctggctactctgcatcccccatatatccaccttggctcaactgccctctttcacaccccaccgaacactggctgagagaacttatactgagatacgaaactggtgggtagacgtttctttgcgaatccgctcactcacacgtactggcgccacaactgcactatggccacccttctatggtcacagttttgttttgatccgcacaagcgatagtggtagcccccacgctcccagctgatgtcgtggtagagttgcttggcgttggttttaatctgacgcctctcaccagattctcatttctttctagaacatatggatcccttcagcattaccgtcggtgctcttggcatcacacaattcgctatatctagcatcggtaacctgcgcgaatttatcaatggccttgacgaagcaaaggatgtgatgcaggatgtgacatctgatttggaagccatacagcttccgctctatgcgctcgagaatctccagatccctgatgataagacatatgttgcagcgaaagcagatctggagaacactggtgttgctgaagccgtgaataaatgtgggcaggcatgcgcggattttactaagaggcttgagcagtggacaaaacattccaccacaacgaaattttctctcagagatcgattgtcggtaggtttatggaacaaagaaaagatccggacctttaggacacaggtccgttcttgtcaagccatcgtccaatttgcaatcgacagcactcagttgtacgtgaaacgtctttgcgctagagaagaggcgctaattaagagcttgaagaattatcctgatccggtccgaaaatgcgtctaaaactgcacgccaagagacagagaaacaactgcgatttctcgaaaatactattcaggagcacatcaacattacaaagagaaagcaagacgaagctcttcagcgcaagaacgcgctcgaaaaccctgaggatgaagatgaggacgatgacggcggagctcagcgaactctcgccatccaagagaccaaagagcaggcacgtttgctagaaagtgaccaagctgcctctggaattgtttcccagatactcttgaaattgtccatcccggtggtcggcaatacatatgaggttactttttcaggtagtcacaatagcggcatgcagatcggccatagtacgggtactatcaactggaatggcagtcgtacctaaaggagggtcatctgtcggatatgtctacagatgatgaatcgaaacgccatccttagggaccttatcagcgtctggcgtctgtttataacttatgtcgcatgttacaatgcgctttggattctcctccatagcttcctagaccttgtgacctgcagctataatttagtctatattgctatgcagttgacgtaaactagcgattttgtcctttaatcactatcgagccgactgtttgactgacagattaaggtgatagcctacttgagacacgaatttgtcacccaaaggtgagcttcgttccaagagagcttcccataagagccgagccatctcattctctacggcttctaggaatgatgcttcgtcgtcatttgatgcgaccagcaggggctctgacatttcaagttggtgtcaagaaacagggtaatactgtctttttaccatgtaaacatgtgactttttcactatgtatttgcttactaattgtgtccgaccagattgtcaaaaccggacaattgttgtttttagttagagaattgtaccattgcgaattttacccgtacgttcgccatacaccaaatttccgtcatatattatgacatgtatagtagatcagagatagttgccctttcggcttacgggcgttaatatattgtgtgtgtaccatgaaaaattgaattctccatgctcacccttgctcacccttctgcccagtgagcgaaaagaaatgatttttgattgagggtgggggatgctggggttttgggaaatgcacgtgaccctgggtctcgtagttcccaggagctcggttgcttctacaaggacgattgaaaactgcgcgggccctcatttattgatatcatagatgctagcttacgtgcctattcttttcctttgagggctaggccactcactgccaagcgcgtatttttgaatggttaatagatccagagagcagttgtatgactcaattaatcttcctaatactgaaatgccctgtaagagacctcattaacgatgatgtaaaattgtgttctcaatatgcatagcacataaatagaggtaaatgaagattaaaagcgagagagggaactgagttccgagagggagaggaataatatacgacttgaaggacagcagattgccacagttgttgcaaatatagcaaacagagaggaggaggccgggcgatactcagcaggcaaccataggaggttgactccgttatgggttacccaggaaaagtcgctattcaatccaaagccacgtatttctgggacggactttgaaaggttggaagcggatgtgacaaatgcatcgcttcggatattgactgtaccgattgtcgtatgtagaaaattatggtcgtgtttataaaattgaacaaagccaggagagttgatcagaagtgtccattcgcactggccggtggccgaatcccagatcctgactgtcttatcatccgagactgatgcgagtcgacttccacaagcagaccatccaatagagctgacggtatcactatggccctcgagattcaatttacactgaccggtggagggatccaagatccttattgtgtcatccaaagacgccaatgcgagtcggcttccatcttgcgaccaggcaatagacctgaaccaaccactgtgcccctcgagagttgatacgcagtgacctgtggcaggatcccagatcctgactgtgttgtcaaatgatgtagatgcaactcggcttccatcttgtgaccaggcaaccgagttgacctgccggctatgaccctcgagcgtcgatgtgcaatggccggtgatcggattccagatcctgactgtcttatcccaagaagctgatgcaagttggcttccatcttgtgaccagactattgacgtaacctcgtcgctatgccgctcgagggttgatgcgctgtgactggttgctggatcccagatcttgactgttttgtcagcggaggctgatgcgagctgtcttccatcctgcgaccagctaaatgagctaaccggagcactatgcccttcgagggttgaggtgcactggccggttgctggatcccagatcctgactgttttatcaattgacgctgatgcgagtcggcttccatcttgcgaccaggcaaccaagcggaccgaatttctatgccccttaaggattgaggtgcactgaccggtgatcgggttccagaccctgactatcttatcgtttgaccatgttgcgagtcgatttcccccccgtgaccagacgatcgacataacctcgtcgctatggcccttgaggattgacgcgctgtgaccggttgctggatcccaaatcctgactgttttgtcagccgaggctgatgcgagctgtcttccatcttgcgaccagctaactgagctcactgaggcactatgaccctcgagatgtaaaatacactggccagtgaccggatcccagatcctaactatgctatcccgggacgccgatgcaagtcggcttccatcttgtgaccaggtaatccaggtcaccggaccaccatatccctcgctatgaaatttctcaacggtgaatatacacctgctggtggccagatcccatattttggctgtcttatcctcagacattgatgcgagtcggcttccatcttgcgaccaagcaatcgctatgaccgatttactatgcccttcaagggttgacgcgcactgacctgtggttggatcccagatcttgactgtcttatcatgggatgccgatgcaagtcggcctccacctggggaccacgtaatcgagttgacagaactactgtgcccttcgagtgttgacgtgcactgtccagtggttggatcccagatcctgactgtattatcagatgaggctgatgcgagtcggcttctatctttcgaccagtcaatcgagttgacctgatgacaatgcccttcgagcgtttgaaggcatggactccaatggttatcggccactggctcattcaaaacccaacttggactctcgttttgataacgtttccttgtgatactctgcagtgggctgaagataagggatgaacagtacagctgaagggggctattctgaatcaccagcctgtggtaacggatgaatcgggaagcgtcccgaacttgatgtaaaagggcctgtggctccccccttttctattttagccatttcactgttagaagtggagataccgtttacataattgaagacttacctgaagtaatccctccagcctcaacatacctactataccttgacagaggtttcctagaatgctaagggcttccagccagtgaaggtacttttgtcgtaggaaaacatccacaagccctccctcatcgaggctaggatcgccgctttcatggtagctgccgtcctgtaaatgatctatccaataaacacaagcgtattgtgcatgtgctaatggattcgtgctaggctgtccaactttatcaattgtgaatccaggaaaattgatttgcaagatatcacggcgaagtgtctggaacatgacttgaaaagaccgcaggaaaattgcctggtgtccagcttccttccctctgggaaagatctcgtcttgggcctcactgagtagatattccttcgcagactgatgaacaaaaatgatagtgtcatcgcgtaatgtcagaaatgagccacaagtcgatatgatctctgacaggatttcattatcacttaggaggtcattaggtaattcaataatggaggccagttcttgaaatgcaatagggcgatacactatcgacatactagccagaatttgcttgcagagttcggcatcttccgagttgcgaacctgatcgatcatccgaccatacaacgcattaagtccaggaggaaatgcctccagcttcttaagagcgtgcctccgcgatgttctatcgaggtcttgacagactaaggctacccaaaggaaagtgccttgcgagttgagtgacaagtaatggcatatcgtatctcgagtttcgtcgctgtattttttaactctcgccagatggtgaaccttatgttgaatgaatttgcccacggcttcagatactaacaactcattcagctctaatgagatcggagtggtctggatagtgtcaagacgctcttcgatatcggaccagttgcggctcgagacaatccactttacttgtgggtaagcagatgatatctgagcaaccaagtcgagaaggggaagtaggcccgatgtgcactcatccagcgcatcgataatcaaataggtgctctgtagggccgggtctttcagaatgtctgtaaaaatcctcgagagggcattccatgcgtttatgtcctcaaacaatgcttttcccgctttatcataccgtcgctgcacatgagagagaagaagtagctgcttctcgacaagcgaatatatcaagccacggagaacagcggtggcattattgattcgcacgtctgttgcttggcaaaagaagaacgagatattcgcagtgtccccaaataatcgtgttaattcatcgatgataccgcacagcagcattgtcttgcccttgcctggatcacctttgatccagaggaggcagttgttctgattgtctcgccattgttgaaactcatcgttgtcgagaacccagcagtatgaatctttgagcagccctccgttggtgttctgaatacggtctttgtcatgtttaggatcagtcgtccgtagatcccgcaagcacgcttgattccatgatgtttccgattgtacttgggtatcacaccgattagtcacgctcctttatagttatgcgttccactcacggaactgattagtgatatgaccaagattctgtccaacttggaacccagagtttgaaccgccatatgatgtcgtgtatgccatttttgcagccaggtgattcttagaaggggcagtcgcgagcatatggctaagtcgttgtagtaccttgtaccccgctatcaggtgatctatcaagcgacactaggaagcagagactggtagttttggttcaggctcctcaatctgtcgagacgcaatacgtataatttacttcattggggaactttagtcacttcggctaatgtttattaatccaccttgcacaagaatgactgctgtcaatattggagtggtgactcgcgaggggcgtcgagataaaggtatcaatcgtatgtttatttccaataaattactgagtagctcatcatgtaaattgaagttacaatacgtttcgatacactcagctggcctaaacctaacgcatactagcgtgtttcaggataaagtttggtaaagaacgaaagagagtaactaaagtggtgaaactgatttcgagcgcgtctgtacatttcggatccgtcctgtatgtatctatctgaacccaaaatcgaacagaggcgaattccgagacgagggatagatactgaacgaaggtggttgatattaccttcgatatatatattcagctgtggttgtgtgccgagcgggaactaaccccggaccgacgatggacccacctatggaagggcccgaaccccctcccacaaacacccaagaaacccccaccagcttctccgtggaagatttccagcccagagtaaacatcggatcccccgaatcccctaccgaaagccgtaagcgaacacgcagcggtgatgcgtttgcaccatcggaaaactcgggtcgagtgaccaccaaggaggtgtggaaactcatcggaaccctgaaagacattatccgccatcaaactgcggtcatcgaatccactcagaacgaactacgggagattaaacacaatcaacatgtcctgcaagaacagaacgagaagctccatgaggaagtgaaagcgttacgagcacaggttgaaagcgcccctgcagtcaccgcgactaggacttgggcagcagtcgcagccactggcgataatgccacaccctcgctgagccaccagaaacccgagaaagagcaaaactgcgtccgaatcagcacccagagagcctttgtagacccaagagataatgacaacaacgacggaaacgcgtttgggcgatatctccccacagataccgtcaacacccacatccgcacagcattgcagagcgacgctgcaacacaagacgcccaagtggtaggaattggcaccaccaaaaccggctatctcattcgattcaagaacgtggagtcggctcaggtggctcgcaacaacactgagtggctacataaattgggcaacaacacgaagctggttaaaccacggttcggcattgtagtgcaccgcgctccaactgacgaatttgacctggaaactggtactgcccaagcagcagtaaaaatcatccaagagaacgacctggcagaacacggtttccacatcgaagaactggcctggatgaaagcgaaggacaaggccctagggaaattcgcatcgttaggaatctggtttgactccgcagaaggagcagaacatatgctccgtagcggtttcgttgtcagtcaacactacatccctcaggtagagcgatgcgagatcaagaaaaagagatgtttccggtgtcaacggtttggacacctggcatggtcatgcaaggaaaccccgcggtgcggacactgtgcaggtcaacacgagcggcagcgctgcccaccaggaatcagggcccgctgcctcgactgtgggggtgagcacgccaccggagatcgacgatgtctaacccccgcgacctctcaccccaaccgatgttagagagcaacctacgcatccttcagttgaatatcatgaaatcaggaccaagaatggaagcactcatcaatgaccaccaaagccaagacctggatatccttctgatccaggagccatcgatcacaacctaccgcacacatgtcaaccacagcgcctggcgactatatcgacccaccacacagaccgacgcagttcggtttcgcagcctcatctacgtgaacagacggatctccacctcctcacaccgtcaagttccctgcaatcacccagatgtcgtagccatcaagatctggacgaccgactctcaaactcttttcttttctgtctacatacctccagtaccgctctttacggtcgatgacgcgtcagcaatgccggtgctcactgcaatagcaaacaccatcacagccgctgtacagaacgagcaacgctctacaagcgtcattatcacgggcgacttcaaccgacatcatccgatgtggggcggtaatcgatccaatgtggggcaacaactatatcgctcctagattcattgaagacgccagcgacctgatcgatttcttccaagcccacaacctccacagttgtctccctcgagggacggcgacttactgggcattcaacaactctagacagaactcgaccattgaccagacggtgacagataacccggacttgctcatcaaatgctatctgtatcacgaaaactatggatccgaccaccgtgccacctatccagaatggaaccttcaactccggagcaggccaaacaccaaagcaaggaaggcgtatgagcgcgcggactggactaggatcggcgaggaagtagtccgacagatgaacccatggaagcagatcaagacccggccaacactcgaccgggtagtggaaaaccttacagcggtgacggcccaggcggtcgaccggttcacacccgacacacgcccgacgccatactccaagcgatggttcacgccagatcttaagacccaacaagtcgaagtcaaccaactgcgtaggaggtggcaggcaaactgcgccgagctgggaagagagcacgctaacaccacggctgccttcgaagctatgcagcagaaacgacgagcgtggacgaggaccatcgagaaagccaagtcctcgcactggaagcagttcctagacgaagctggtgaagggaagctctggaaggccgcgacatacatgaagccccgagagacatggggttgtgtcccagcactgcgagtgggctcggacgattgcacccaaaatgaagacaaagcgagggcattcatggatgcgttcttccccgccatgaatacacccgaaatcagcccacccaccgcaacggagacggaacttcagtggcatccgattactgaattggagatcgagcgatcactgaaagcagctaaagggaatactgcacccggggaagataacttaccgatgctggtctggaagaagctttggaagtatctaaaggtctttattgtgagcatcttcacagtgtgtatagagctaggacaccacccgagacagtggaggagcgcgaaaatcatcgtcttacggaaaccaggcaagcctgattactcggcccctggtgcttaccgcccaatctcacttttgaacacacttggcaagctcctggaggcagtaatggcccgacggttatcctatgtggcggagaaacacagcctgctaccaaacagccagttcggcggacggccgggtaggaccaccgagcaagctctactagtgctgtccagtgcgatcgacaaagcctggtacaagcacaaggtggtgaccctaatcgccttcgacctcaaaggtgccttcaacggagtcaataagacaagcctggatgcgtcgctgcaggcaagacggatcccgattgtggccagaaaatggatcgcaagcttcatgagcgaccggcacgccaacattgggtttgacgacttccgcactgagactgctccgctggtgaacgctgggctagctcaaggatcaccactttcccccatcttgtttgcattcttcaacgccgacctagtcgaccagcccgtcgactcccagggaggtgcgtcggcattcattgacgactacttccgatggagaggnnnnnnnnnnnnnnnnnnnnnnnnnnnnnnnnnnnnnnnnnnnnnnnnnnnnnnnnnnnnnnnnnnnnnnnnnnnnnnnnnnnnnnnnnnnnnnnnnnnnnnnnnnnnnnnnnnnnnnnnnnnnnnnnnnnnnnnnnnnnnnnnnnnnnnnnnnnnnnnnnnnnnnnnnnnnnnnnnnnnnnnnnnnnnnnnnnnnnnnnnnnnnnnnnnnnnnnnnnnnnnnnnnnnnnnnnnnnnnnnnnnnnnnnnnnnnnnnnnnnnnnnnnnnnnnnnnnnnnnnnnnnnnnnnnnnnnnnnnnnnnnnnnnnnnnnnnnnnnnnnnnnnnnnnnnnnnnnnnnnnnnnnnnnnnnnnnnnnnnnnnnnnnnnnnnnnnnnnnnnnnnnnnnnnnnnnnnnnnnnnnnnnnnnnnnnnnnnnnnnnnnnnnnnnnnnnnnnnnnnnnnnnnnnnnnnnnnnnnnnnnnnnnnnnnnnnnnnnnnnnnnnnnnnnnnnnnnnnnnnnnnnnnnnnnnnnnnnnnnnnnnnnnnnnnnnnnnnnnnnnnnnnnnnnnnnnnnnnnnnnnnnnnnnnnnnnnnnnnnnnnnnnnnnnnnnnnnnnnnnnnnnnnnnnnnnnnnnnnnnnnnnnnnnnnnnnnnnnnnnnnnnnnnnnnnnnnnnnnnnnnnnnnnnnnnnnnnnnnnnnnnnnnnnnnnnnnnnnnnnnnnnnnnnnnnnnnnnnnnnnnnnnnnnnnnnnnnnnnnnnnnnnnnnnnnnnnnnnnnnnnnnnnnnnnnggcagatacgacagctctaccaggcatgtatcgcacctatagtagactacgcatcgacggtctagcatgacccgcttagagacaaagttcacatccgacacttgaacacagttcagagaaacgtgctgatcagaatcctgtcggcgttcaggacggtagcaaccgcgaccctagaggttgaagcctatatactccccacgcaccttcgccttcgccaccgagcgcagcgcacgattgcgagactgcacactctacctcgcgaccatcccatttggagtgctctgtcaagagcccagaaccgtaggaacaatgtcggatcatacgcccgcttcccattagcagaagcgctgaagaccatggacgttgacaggctcaacgaactggagatgattgacccacgcccgctaccaccgtggcgaaaggacgccttcacagagattgagcttgaacccgaccgagagacagcgagagatagggcggtgtccgcaaaggacacgtcaaacatcgtcgtctactcagacgcctccgggcgtgagggccatctaggagccgctatcgtggccctgaacgacaatgatgaggtgacggaatcccaacaggtgcaagtggggtcgatggaacggtggtcggttcatgtagcggaactcataggcatcttctacgcggtcagcacggtattcaagttggctcaccaacgcacgagcgtcggaaatcatatacacgtaacagcaacaatcctttgtgatagcagatccgctttgcaagcaatccagaatgtgaagaatagatcggggcaacgaataacccacgcaatcctccaagcagccaccgaggttcaagcagggcatattgccctccgtcttcagtggatgccgggacattgtggaaacgtcgggaacgagaccgcggatcgactcgccaaagaagccgcacaaccgggcaaaacccatcctttccggccgctgctgacgagagagaacgcctttctccgcagcaagacccatgctcagtgggagcaggagtggaagtcaagcaccaaaggtgcgcacctacggaaggtggacggcgcgctaccagcgaggtacaccaggaaaatgtacggaagcttgcccaggaaccgagcatacctgctcactcagctgcgcacgggccacaactggttatccacttacgccaagaaatttggcttccgggacgatgatcgatgcgagtgcggcgcgcaggagacggtcagccacgtgttgctggaatgtccaaaactacgagacttgcggatagaattaagaagaaatgttggggacgcgttgaacagcgtgtcgagtctgctgggaggctcaaacgaaggtgtgagaggtaagccagacaccgtctcgagggcgaagacggttcaggccgtattggacttcgccgaggcgtcacagaggtttcgcagtcgtgcgccacaagggcagcctaacagcgggagcggcaataggccagggcaggccgtgacgaggctctaagattcagtcagaaagtggatcactctacatgtacatactcggatatatagtcgttgtatactgcatatcgctttgcgaggggtcagtgtaaatgaattctactactactactactactactacgtctgtacatttcaatgacttgaaatttgctaaatcaaaaacagactagcgtgtttcaggatttattttgggaaagaatcgaagagaataaagtggtgaaactgatttcgagcgcgtctgtacttactccttcggaccttgcaaattgctgatagcccgataaattctcatttgaggatgagtcgttgggatctgtcaatatcgaacaatatggctcagatggtccacacccccattgctgcatgaagccttcctcctgggacatgttgtaattcccttattaacgcaggccaaacaataaagaggcaaggaaaacgagtgtggggaggggaggctagtgtacaaaaatgatgggacgcctaggtgcgcagcacctgagcagggaaagccaaagctttgggggggggggaacgtcggggacaaaggagacggaagatgggactggggggagcgaccaatttaaggccaaggtgggggcaaggcgcgcgcctggaggaagggagggggaaatgctaaatcgaaggttctagtctccaagcagcgaccgcaagtggcttgtggtcgcagagtcaggcggttttgaatcgcgaagttggacatccaataggctttccccacgcacctccactaccgcaacaagtcgacttcatacataaacttcgaggaagataaaataatttctctggacgcttcagcaccatttgtggcacggccactctcacactggaagtctctggtcgtaaagaaaggcctctcgagaaaggagaaaacggttctacgtcagtgtggagacgatttggacgatctcagatccacaagacccataactcctttttagctatttttagcttggtcaaggtacccataaagccagaccaaaggccttcagcttgaaagagtatatctgcctaaagtagcatacccaaagtgtgccacaagcaaaaaagtatgcctatatcattcacttactatatttaggcgcatcccaagcaggcgcgcttcttctgatagagcccgtcctgggacagaccacggttttccctcctcgaagctatcccaagtagggttgcttcttctgatagagtccgtcctgggacagaccacggttcttcccctccttctacactatcccaaatagggttgcttcttctgatagagtccgtcctgggacgggccacggttttccctccttctacactatcgcatgcagatggaccccaggaagcaccaaactctccgcattacagtaaagcaactgcgaaatgcagaagggagaagttgacactttgccagttaggatgttgctttgtttgtgctgtttgttgcgtttgcgtggaatcttcttggtagtctagccttctaattataggctcttatatctgtcttacaatctacagtcatgttgcatgagtatttgcacccaagtacttcggaagccccacttttcttctgccggttaaaccctctcattgaaaaatatatagctaactagctagtaacaagtatgccaaccttcacatatacgctcacgaacgtatggtggaagctctggactggggaaaaaaagggtagtaacctttataatactatagtataatacgcgcatgtcggatagggtttatactagtagtaataagcaggcggtaaaaaagggcggtcaaagatggaggtactggggtgcgaatactcatgcaacgccactgtataaaaaggaattgggattattacgagtatgtacaaaacgggtatatttactgcatcatgtgctttcctcaaaacataatcaatagtcgcggcaactctatgctcaggctctagattgccgcagccttcaatttcaaacatcctaagaagtttctccacatttttctcggcgatctgtcgggttcccgtgaggttatccgtttcaaatctgagatactgtaactttataattgcgcatccctcataatattttagtcgatggagggcgaggctgtttgttcggtggccaagaaggttttcgcttgcttccattctcttaatatgttttgttttgctttaaaggaaagaggacaatagtctatccgaaagaatagaaaggacggccataataatttaaatgtacctacgacactgaaacccgtgtcgcgcttttgccgcacccccgagccctccggtatggcccggctctccagtgtctctagtgcgtccctactctctagtacgtccctactctctagtgtgtccctactctccagtgcgtcccgactctctagtacgtccctactctctaagccccccgcaggagtataggttccggcaggagtataggttcccgcaggagtgtaggttcccgcaggagtgtatgttcccgcaggattaagcctcccgcaggagtgtaggttcccgcaggagtatgttcccgcaggattaagcctcccgcaggagtataggttcccgcaggattaagcctcccgcaggattgagcctcctgcaggattgagcctcccgcaggagtataggttcccgcgggagtgtaggttcccgcaggattgagcctcccgtagaagtgtattgattacctgttcaagatcccacgagtagggccctcgcgttccttggaccatattcgaccgtatgacccatggcatggtccctaggcacactactgattgctcccagagtaggaatcataattcccggaagatatacagctcctaggattgaaatgtatagctccggggaacgaaaggtggtaccctaggagcttcgctcttactttctccgcctgagagacggacttataccgtcattcctccgactaagcggacgaaaagggggaccagatctttgtaatttactgggaagggatcctaggcgcctataagacacccctcttaggacatgcgtagacctatatggcttgaaataagagcgtactactgataagacgtatggcaccccgcgagaaatctaataggagtggtactgggatgagagactgcttttgtcactatgatagagctatgtagagtatcctagaggtggtaatacgaaaggaaattgataacagataaagactatttttagctagcttatttcaaaagtgagggtcacttagaaggctgaggataagagacctctcaaaataggtacctactcgtgatagaatcctcttgagaggaaattcgtcacagtatgtcccacagaagagccccagcaacatagaagggaaaacgttatatgagctggctcttggtactactcctctcctagtccacttattctaggtttaatccagtctcgggatagtctagaggcgaccagggaatacgcacgacggttctcagccagatacccatgctgtcctagtgagggctggtgtcattggcttatcagctgaaaggtgggtccccgcagtggcctttgatgcggcgatcgaggatggcactaacacgatatttatgacattcggcgacgatctggctgtgagtgaaaaggcggcggattcgatcacacgtgcactcaaagccgatagtgatcataatcggccgacaagaccccggcagaagatgataaataatgcacttgagatctaggtcaaaatacctgtgacccatatagaccgtagtcagaagaccgaggacccttatggccactaagccagggtggccgccagttgccagctctaaagcctatctagactaggggctgtggacgtatgtccaatgtggacctgcgtccacggctgtcggtaattggccttgagtcaactgttctggatcacggggcctagaaccaaggccttgcggtcgcagctccctaaccacggacgcacatctccaggcctgggactaggggggacgccagttggcagccagagggctcgccaggatcatgggccatggtcgtacgaccagataggacttagacctatgaaccctaggaacaagatgtggggctcccgggaatgccgatcgagttccccggaaccaaccacagcccaggaacgccagacgcgctcctaggcatggatcaagtgatcccagaaacacctcgtgtcctcgaggaactctaagtctgatccctaggagcgaccaagagcgtgcctaggaaccatactatagatcctaggaatgagagtcctggtaagggggtctagaatacatagctataaccaattttagaaatacaaattttagaacgcgggcaataagagcggcaacagaaagaaggcctaatcattgaatattattagccaagcggcactctacctcaaatctcagcccccttccgtactgtagggggaactactggcttggatttgatgcctgtggaatctgacataaaagttggcatgccatggaggattttttctaggttggtaggatgaaataattcttacaccagactttgggggggggggggggggccgggggattaggnnnnnnnnnnnnnnnnnnnnnnnnnnnnnnnnnnnnnnnnnnnnnnnnnnnnnnnnnnnnnnnnnnnnnnnnnnnnnnnnnnnnnnnnnnnnnnnnnnnnnnnnnnnnnnnnnnnnnnnnnnnnnnnnnnnnnnnnnnnnnnnnnnnnnnnnnnnnnnnnnnnnnnnnnnnnnnnnnnnnnnnnnnnnnnnnnnnnnnnnnnnnnnnnnnnnnnnnnnnnnnnnnnnnnnnnnnnnnnnnnnnnnnnnnnnnnnnnnnnnnnnnnnnnnnnnnnnnnnnnnnnnnnnnnnnnnnnnnnnnnnnnnnnnnnnnnnnnnnnnnnnnnnnnnnnnnnnnnnnnnnnnnnnnnnnnnnnnnnnnnnnnnnnnnnnnnnnnnnnnnnnnnnnnnnnnnnnnnnnnnnnnnnnnnnnnnnnnnnnnnnnnnnnnnnnnnnnnnnnnnnnnnnnnnnnnnnnnnnnnnnnnnnnnnnnnnnnnnnnnnnnnnnnnnnnnnnnnnnnnnnnnnnnnnnnnnnnnnnnnnnnnnnnnnnnnnnnnnnnnnnnnnnnnnnnnnnnnnnnnnnnnnnnnnnnnnnnnnnnnnnnnnnnnnnnnnnnnnnnnnnnnnnnnnnnnnnnnnnnnnnnnnnnnnnnnnnnnnnnnnnnnnnnnnnnnnnnnnnnnnnnnnnnnnnnnnnnnnnnnnnnnnnnnnnnnnnnnnnnnnnnnnnnnnnnnnnnnnnnnnnnnnnnnnnnnnnnnnnnnnnnnnnnnnnnnnnnnnnnnnnnnnnnnnnnnnnnnnnnnnnnnnnnnnnnnnnnnnnnnnnnnnnnnnnnnnnnnnnnnnnnnnnnnnnnnnnnnnnnnnnnnnnnnnnnnnnnnnnnnnnnnnnnnnnnnnnnnnnnnnnnnnnnnnnnnnnnnnnnnnnnnnnnnnnnnnnnnnnnnnnnnnnnnnnnnnnnnnnnnnnnnnnnnnnnnnnnnnnnnnnnnnnnnnnnnnnnnnnnnnnnnnnnnnnnnnnnnnnnnnnnnnnnnnnnnnnnnnnnnnnnnnnnnnnnnnnnnnnnnnnnnnnnnnnnnnnnnnnnnnnnnnnnnnnnnnnnnnnnnnnnnnnnnnnnnnnnnnnnnnnnnnnnnnnnnnnnnnnnnnnnnnnnnnnnnnnnnnnnnnnnnnnnnnnnnnnnnnnnnnnnnnnnnnnnnnnnnnnnnnnnnnnnnnnnnnnnnnnnnnnnnnnnnnnnnnnnnnnnnnnnnnnnnnnnnnnnnnnnnnnnnnnnnnnnnnnnnnnnnnnnnnnnnnnnnnnnnnnnnnnnnnnnnnnnnnnnnnnnnnnnnnnnnnnnnnnnnnnnnnnnnnnnnnnnnnnnnnnnnnnnnnnnnnnnnnnnnnnnnnnnnnnnnnnnnnnnnnnnnnnnnnnnnnnnnnnnnnnnnnnnnnnnnnnnnnnnnnnnnnnnnnnnnnnnnnnnnnnnnnnnnnnnnnnnnnnnnnnnnnnnnnnnnnnnnnnnnnnnnnnnnnnnnnnnnnnnnnnnnnnnnnnnnnnnnnnnnnnnnnnnnnnnnnnnnnnnnnnnnnnnnnnnnnnnnnnnnnnnnnnnnnnnnnnnnnnnnnnnnnnnnnnnnnnnnnnnnnnnnnnnnnnnnnnnnnnnnnnnnnnnnnnnnnnnnnnnnnnnnnnnnnnnnnnnnnnnnnnnnnnnnnnnnnnnnnnnnnnnnnnnnnnnnnnnnnnnnnnnnnnnnnnnnnnnnnnnnnnnnnnnnnnnnnnnnnnnnnnnnnnnnnnnnnnnnnnnnnnnnnnnnnnnnnnnnnnnnnnnnnnnnnnnnnnnnnnnnnnnnnnnnnnnnnnnnnnnnnnnnnnnnnnnnnnnnnnnnnnnnnnnnnnnnnnnnnnnnnnnnnnnnnnnnnnnnnnnnnnnnnnnnnnnnnnnnnnnnnnnnnnnnnnnnnnnnnnnnnnnnnnnnnnnnnnnnnnnnnnnnnnnnnnnnnnnnnnnnnnnnnnnnnnnnnnnnnnnnnnnnnnnnnnnnnnnnnnnnnnnnnnnnnnnnnnnnnnnnnnnnnnnnnnnnnnnnnnnnnnnnnnnnnnnnnnnnnnnnnnnnnnnnnnnnnnnnnnnnnnnnnnnnnnnnnnnnnnnnnnnnnnnnnnnnnnnnnnnnnnnnnnnnnnnnnnnnnnnnnnnnnnnnnnnnnnnnnnnnnnnnnnnnnnnnnnnnnnnnnnnnnnnnnnnnnnnnnnnnnnnnnnnnnnnnnnnnnnnnnnnnnnnnnnnnnnnnnnnnnnnnnnnnnnnnnnnnnnnnnnnnnnnnnnnnnnnnnnnnnnnnnnnnnnnnnnnnnnnnnnnnnnnnnnnnnnnnnnnnnnnnnnnnnnnnnnnnnnnnnnnnnnnnnnnnnnnnnnnnnnnnnnnnnnnnnnnnnnnnnnnnnnnnnnnnnnnnnnnnnnnnnnnnnnnnnnnnnnnnnnnnnnnnnnnnnnnnnnnnnnnnnnnnnnnnnnnnnnnnnnnnnnnnnnnnnnnnnnnnnnnnnnnnnnnnnnnnnnnnnnnnnnnnnnnnnnnnnnnnnnnnnnnnnnnnnnnnnnnnnnnnnnnnnnnnnnnnnnnnnnnnnnnnnnnnnnnnnnnnnnnnnnnnnnnnnnnnnnnnnnnnnnnnnnnnnnnnnnnnnnnnnnnnnnnnnnnnnnnnnnnnnnnnnnnnnnnnnnnnnnnnnnnnnnnnnnnnnnnnnnnnnnnnnnnnnnnnnnnnnnnnnnnnnnnnnnnnnnnnnnnnnnnnnnnnnnnnnnnnnnnnnnnnnnnnnnnnnnnnnnnnnnnnnnnnnnnnnnnnnnnnnnnnnnnnnnnnnnnnnnnnnnnnnnnnnnnnnnnnnnnnnnnnnnnnnnnnnnnnnnnnnnnnnnnnnnnnnnnnnnnnnnnnnnnnnnnnnnnnnnnnnnnnnnnnnnnnnnnnnnnnnnnnnnnnnnnnnnnnnnnnnnnnnnnnnnnnnnnnnnnnnnnnnnnnnnnnnnnnnnnnnnnnnnnnnnnnnnnnnnnnnnnnnnnnnnnnnnnnnnnnnnnnnnnnnnnnnnnnnnnnnnnnnnnnnnnnnnnnnnnnnnnnnnnnnnnnnnnnnnnnnnnnnnnnnnnnnnnnnnnnnnnnnnnnnnnnnnnnnnnnnnnnnnnnnnnnnnnnnnnnnnnnnnnnnnnnnnnnnnnnnnnnnnnnnnnnnnnnnnnnnnnnnnnnnnnnnnnnnnnnnnnnnnnnnnnnnnnnnnnnnnnnnnnnnnnnnnnnnnnnnnnnnnnnnnnnnnnnnnnnnnnnnnnnnnnnnnnnnnnnnnnnnnnnnnnnnnnnnnnnnnnnnnnnnnnnnnnnnnnnnnnnnnnnnnnnnnnnnnnnnnnnnnnnnnnnnnnnnnnnnnnnnnnnnnnnnnnnnnnnnnnnnnnnnnnnnnnnnnnnnnnnnnnnnnnnnnnnnnnnnnnnnnnnnnnnnnnnnnnnnnnnnnnnnnnnnnnnnnnnnnnnnnnnnnnnnnnnnnnnnnnnnnnnnnnnnnnnnnnnnnnnnnnnnnnnnnnnnnnnnnnnnnnnnnnnnnnnnnnnnnnnnnnnnnnnnnnnnnnnnnnnnnnnnnnnnnnnnnnnnnnnnnnnnnnnnnnnnnnnnnnnnnnnnnnnnnnnnnnnnnnnnnnnnnnnnnnnnnnnnnnnnnnnnnnnnnnnnnnnnnnnnnnnnnnnnnnnnnnnnnnnnnnnnnnnnnnnnnnnnnnnnnnnnnnnnnnnnnnnnnnnnnnnnnnnnnnnnnnnnnnnnnnnnnnnnnnnnnnnnnnnnnnnnnnnnnnnnnnnnnnnnnnnnnnnnnnnnnnnnnnnnnnnnnnnnnnnnnnnnnnnnnnnnnnnnnnnnnnnnnnnnnnnnnnnnnnnnnnnnnnnnnnnnnnnnnnnnnnnnnnnnnnnnnnnnnnnnnnnnnnnnnnnnnnnnnnnnnnnnnnnnnnnnnnnnnnnnnnnnnnnnnnnnnnnnnnnnnnnnnnnnnnnnnnnnnnnnnnnnnnnnnnnnnnnnnnnnnnnnnnnnnnnnnnnnnnnnnnnnnnnnnnnnnnnnnnnnnnnnnnnnnnnnnnnnnnnnnnnnnnnnnnnnnnnnnnnnnnnnnnnnnnnnnnnnnnnnnnnnnnnnnnnnnnnnnnnnnnnnnnnnnnnnnnnnnnnnnnnnnnnnnnnnnnnnnnnnnnnnnnnnnnnnnnnnnnnnnnnnnnnnnnnnnnnnnnnnnnnnnnnnnnnnnnnnnnnnnnnnnnnnnnnnnnnnnnnnnnnnnnnnnnnnnnnnnnnnnnnnnnnnnnnnnnnnnnnnnnnnnnnnnnnnnnnnnnnnnnnnnnnnnnnnnnnnnnnnnnnnnnnnnnnnnnnnnnnnnnnnnnnnnnnnnnnnnnnnnnnnnnnnnnnnnnnnnnnnnnnnnnnnnnnnnnnnnnnnnnnnnnnnnnnnnnnnnnnnnnnnnnnnnnnnnnnnnnnnnnnnnnnnnnnnnnnnnnnnnnnnnnnnnnnnnnnnnnnnnnnnnnnnnnnnnnnnnnnnnnnnnnnnnnnnnnnnnnnnnnnnnnnnnnnnnnnnnnnnnnnnnnnnnnnnnnnnnnnnnnnnnnnnnnnnnnnnnnnnnnnnnnnnnnnnnnnnnnnnnnnnnnnnnnnnnnnnnnnnataggtagtttgccgtgtaggggggggggggggggggggggggggtgcctgggtattaggaaattcgcctgatagagtggagtatgttccctagccaatcatacataataaacaccttatttctttcaccactttcattgaaaagataaatgaattaattggatttttattctttttgtagtcagatttctgtgacaatcaattgttttgcaaattttctcttgcccgttggttgaccttttaacttttagcagggtatcaatgattcggtcaactcctaaccgttatattttatcgtgtatcaacatgatgcccgacggttcaaggatttgctagtgctgaaagtttgctgtagtgacgttgcagacacgtaaaaggtatggcgggcaataagtcaataacgttaaaagtacggtcgtttcacgttgccgcacctatttgatgaccgcaaataacaccagtaattgttgcccttccatttatgcggggtctgccttcataagttcaacacacaaaggaccgattttcgtgtagtactttgaatatcgtggtcttttcgcgttccatgattgaagactccccttcatgtaataacatttatatttattgggcccctttccattagcggatctaagttttataagagtccctgctatctatattttctatataggcttctctactcctaaagtacctccagatatcaaggcaacgcgctcaatggccgctatcaaggctaccaggtcaaaggatgtcgtttcaaaaagaaagttgatgcggcaaaaacaatgccgtcgcaaaacaagtctgatgaaaaaggcatgcgaatatagcaggatgtgcggcgcagacgtatgcgtgggaattcgtatccgagagacgggccaggtacatattttatcagcggatacttcgggattttgggctttccttagctcgcaattagtatgtctcaaactatggctctgatgaaaaggtgactgacctatcaagaactcctactatccagcgccaatgctagtgacacaccaggatctaccgcaggttgataaagatacaccgcaacaacctatatgaagtcataagaccgaagcggaaccttcatcagaaagaacctttgtttttcccatcctcggtcagggattttatgcaaccactatcccaatagtttaatttactttactgagaatatagctgtgattggcggtccaatgatgaattctatatgaggtaattttccatgtgcagttccccatacggaagagggctctgtatggaagaaggctccgtatggaagaagactacacatggagactcactgattaccaacccaaacagggatggcaaatgcgagatatcattggctagcttgactactccttgaagcgccagactactcggtcttcctactccaaggtggagaaaggagtcctagagaacccttcttagacctccttatctccggctaacgccgaacgactttaatattattgcctccataattttcacctagattaattttagcctcatgaataattatgccagacctaatattatatctttgtaaatttaaagcactccaatatcattgccaccataattttagccttataaataattataacggggctaatattgtgtcatagtaaatttaaaactcgccaatttttaatatagctaagattaaagtaaatacatgcattcttgtaaagtaaattagaaatatgggacaaagataagaagtaattccatgaatttgtcactggctggtcttctttgcttgtattcatttgtctggaacggaacgcacctaagattccttgaaaaagcaaagggagccccaacagcagaccactagttagtagcagattcgagaaagcctcttttggcatttccaggtgacagatgcaaatggtattgctcttgtcgagcagctgcgcggacgataggatgaaatggcatgatgtgcttggtggctttgacggagacgcgccatgaaacgcgcggctctgtcgcagtatcgtcatgaaatatggcccaacgaaggcacacattggcgtaaccaccaggttcagatacctgcatttgattcagcgccccagtcacctgagaatagtctagccacagactctcggcgggacctgagataccgtgggtgacgttaaaatcctccgagaaacggatagtgccggcaaatatacccaggaagtctccctcgcagataggcacaatagaagagacgaatagagaatcgtcgtctttaggcagaagagtgatgaatgcggacttgtctgtcccaccttcgtataccgattcatcgttgtgtggtatgcctagaatatcagtcgagatagacactgagccgcattgcctgaagctttcttcttcggtgttgacggcccactcgttcgaagcattatcccaagagagctctggcactttcaaccgttctagcacctgaggattggtgaggtagctaagacgcttcgagtctcctgtcttcaatttggtaatccgcgtttccagttgttcgaaatgagggagatactcgttttcccatctcaaaactttatccacaagcggagtttccgatgttttggaataacctctgcagaaactgtcgaattctttcgtacggtagaagagaattttctcaataccagcctcacgcatgtggaatatgttcttccagaaaatgcggtattgtcgctggttttctgcacccaagctatacccggtgtcttccatgaatttctttgtggcagctttttccgccatggtgaatccatcagccgggcccttgacgggtggcagcgtggcagggtcgatcagcgccgcgcacttgagaatgattggccagaagatagtttcgttgtatcttgtctgtattgccctgccagtagttaaagcagtgtctcttcgaatagcgtgaattgcctgctcataactgtatccagagaactcttgggcgtgctcccgcatcctctcgagcttagttgttgccagggccatgcagtcgcgctgtccatattgtgcgatatcagagttgtatttgacacattgtatcaatattgttgttatgaccttcatctcgaaggctgagtttaggtgtaacggcaaagagctgtcaaggggatctggcacagattcggggtcgtcgacttcggactaaacatgacccatgtatctattagactttcttcaatctagatgaacaaaataacataccgttgtttgtacttctggcgaaattgattcctcgggtgccttatctttggctgtcccatttccatcagctactgacgaaccgggcggttgatctatcaactccgaccggtggcttctttttctcctctttttcttcttcttctccgtgctggccatatcgctataggttgtaggaccctccttccctgtccgtttcataagtcgataggacccacgagtgtcatgtggtggagtcggaggggtttctatggtcgcttccttagcctgagaaataggctcggtcgcgcccctagcaatcacgagtcgagctttgtaaactaaagcgaccgttaatgatccattctctcagacgttggcgggggctaactcaccatgatcggcagcgtgggcgataaccagattaaggtgctcctcactgtcctcaattccgcaaattgtgaatacctctcgtatcttctgggctgtcaggcccacaatgnnnnnnnnnnnnnnnnnnnnnnnnnnnnnnnnnnnnnnnnnnnnnnnnnnnnnnnnnnnnnnnnnnnnnnnnnnnnnnnnnnnnnnnnnnnnnnnnnnnnnnnnnnnnnnnnnnnnnnnnnnnnnnnnnnnnnnnnnnnnnnnnnnnnnnnnnnnnnnnnnnnnnnnnnnnnnnnnnnnnnnnnnnnnnnnnnnnnnnnnnnnnnnnnnnnnnnnnnnnnnnnnnnnnnnnnnnnnnnnnnnnnnnnnnnnnnnnnnnnnnnnnnnnnnnnnnnnnnnnnnnnnnnnnnnnnnnnnnnnnnnnnnnnnnnnnnnnnnnnnnnnnnnnnnnnnnnnnnnnnnnnnnnnnnnnnnnnnnnnnnnnnnnnnnnnnnnnnnnnnnnnnnnnnnnnnnnnnnnnnnnnnnnnnnnnnnnnnnnnnnnnnnnnnnnnnnnnnnnnnnnnnnnnnnnnnnnnnnnnnnnnnnnnnnnnnnnnnnnnnnnnnnnnnnnnnnnnnnnnnnnnnnnnnnnnnnnnnnnnnnnnnnnnnnnnnnnnnnnnnnnnnnnnnnnnnnnnnnnnnnnnnnnnnnnnnnnnnnnnnnnnnnnnnnnnnnnnnnnnnnnnnnnnnnnnnnnnnnnnnnnnnnnnnnnnnnnnnnnnnnnnnnnnnnnnnnnnnnnnnnnnnnnnnnnnnnnnnnnnnnnnnnnnnnnnnnnnnnnnnnnnnnnnnnnnnnnnnnnnnnnnnnnnnnnnnnnnnnnnnnnnnnnnnnnnnnnnnnnnnnnnnnnnnnnnnnnnnnnnnnnnnnnnnnnnnnnnnnnnnnnnnnnnnnnnnnnnnnnnnnnnnnnnnnnnnnnnnnnnnnnnnnnnnnnnnnnnnnnnnnnnnnnnnnnnnnnnnnnnnnnnnnnnnnnnnnnnnnnnnnnnnnnnnnnnnnnnnnnnnnnnnnnnnnnnnnnnnnnnnnnnnnnnnnnnnnnnnnnnnnnnnnnnnnnnnnnnnnnnnnnnnnnnnnnnnnnnnnnnnnnnnnnnnnnnnnnnnnnnnnnnnnnnnnnnnnnnnnnnnnnnnnnnnnnnnnnnnnnnnnnnnnnnnnnnnnnnnnnnnnnnnnnnnnnnnnnnnnnnnnnnnnnnnnnnnnnnnnnnnnnnnnnnnnnnnnnnnnnnnnnnnnnnnnnnnnnnnnnnnnnnnnnnnnnnnnnnnnnnnnnnnnnnnnnnnnnnnnnnnnnnnnnnnnnnnnnnnnnnnnnnnnnnnnnnnnnnnnnnnnnnnnnnnnnnnnnnnnnnnnnnnnnnnnnnnnnnnnnnnnnnnnnnnnnnnnnnnnnnnnnnnnnnnnnnnnnnnnnnnnnnnnnnnnnnnnnnnnnnnnnnnnnnnnnnnnnnnnnnnnnnnnnnnnnnnnnnnnnnnnnnnnnnnnnnnnnnnnnnnnnnnnnnnnnnnnnnnnnnnnnnnnnnnnnnnnnnnnnnnnnnnnnnnnnnnnnnnnnnnnnnnnnnnnnnnnnnnnnnnnnnnnnnnnnnnnnnnnnnnnnnnnnnnnnnnnnnnnnnnnnnnnnnnnnnnnnnnnnnnnnnnnnnnnnnnnnnnnnnnnnnnnnnnnnnnnnnnnnnnnnnnnnnnnnnnnnnnnnnnnnnnnnnnnnnnnnnnnnnnnnnnnnnnnnnnnnnnnnnnnnnnnnnnnnnnnnnnnnnnnnnnnnnnnnnnnnnnnnnnnnnnnnnnnnnnnnnnnnnnnnnnnnnnnnnnnnnnnnnnnnnnnnnnnnnnnnnnnnnnnnnnnnnnnnnnnnnnnnnnnnnnnnnnnnnnnnnnnnnnnnnnnnnnnnnnnnnnnnnnnnnnnnnnnnnnnnnnnnnnnnnnnnnnnnnnnnnnnnnnnnnnnnnnnnnnnnnnnnnnnnnnnnnnnnnnnnnnnnnnnnnnnnnnnnnnnnnnnnnnnnnnnnnnnnnnnnnnnnnnnnnnnnnnnnnnnnnnnnnnnnnnnnnnnnnnnnnnnnnnnnnnnnnnnnnnnnnnnnnnnnnnnnnnnnnnnnnnnnnnnnnnnnnnnnnnnnnnnnnnnnnnnnnnnnnnnnnnnnnnnnnnnnnnnnnnnnnnnnnnnnnnnnnnnnnnnnnnnnnnnnnnnnnnnnnnnnnnnnnnnnnnnnnnnnnnnnnnnnnnnnnnnnnnnnnnnnnnnnnnnnnnnnnnnnnnnnnnnnnnnnnnnnnnnnnnnnnnnnnnnnnnnnnnnnnnnnnnnnnnnnnnnnnnnnnnnnnnnnnnnnnnnnnnnnnnnnnnnnnnnnnnnnnnnnnnnnnnnnnnnnnnnnnnnnnnnnnnnnnnnnnnnnnnnnnnnnnnnnnnnnnnnnnnnnnnnnnnnnnnnnnnnnnnnnnnnnnnnnnnnnnnnnnnnnnnnnnnnnnnnnnnnnnnnnnnnnnnnnnnnnnnnnnnnnnnnnnnnnnnnnnnnnnnnnnnnnnnnnnnnnnnnnnnnnnnnnnnnnnnnnnnnnnnnnnnnnnnnnnnnnnnnnnnnnnnnnnnnnnnnnnnnnnnnnnnnnnnnnnnnnnnnnnnnnnnnnnnnnnnnnnnnnnnnnnnnnnnnnnnnnnnnnnnnnnnnnnnnnnnnnnnnnnnnnnnnnnnnnnnnnnnnnnnnnnnnnnnnnnnnnnnnnnnnnnnnnnnnnnnnnnnnnnnnnnnnnnnnnnnnnnnnnnnnnnnnnnnnnnnnnnnnnnnnnnnnnnnnnnnnnnnnnnnnnnnnnnnnnnnnnnnnnnnnnnnnnnnnnnnnnnnnnnnnnnnnnnnnnnnnnnnnnnnnnnnnnnnnnnnnnnnnnnnnnnnnnnnnnnnnnnnnnnnnnnnnnnnnnnnnnnnnnnnnnnnnnnnnnnnnnnnnnnnnnnnnnnnnnnnnnnnnnnnnnnnnnnnnnnnnnnnnnnnnnnnnnnnnnnnnnnnnnnnnnnnnnnnnnnnnnnnnnnnnnnnnnnnnnnnnnnnnnnnnnnnnnnnnnnnnnnnnnnnnnnnnnnnnnnnnnnnnnnnnnnnnnnnnnnnnnnnnnnnnnnnnnnnnnnnnnnnnnnnnnnnnnnnnnnnnnnnnnnnnnnnnnnnnnnnnnnnnnnnnnnnnnnnnnnnnnnnnnnnnnnnnnnnnnnnnnnnnnnnnnnnnnnnnnnnnnnnnnnnnnnnnnnnnnnnnnnnnnnnnnnnnnnnnnnnnnnnnnnnnnnnnnnnnnnnnnnnnnnnnnnnnnnnnnnnnnnnnnnnnnnnnnnnnnnnnnnnnnnnnnnnnnnnnnnnnnnnnnnnnnnnnnnnnngggtcggtcgcgcccctagcaatcacgagtcgagctttgtaaactaaagcgaccgttaatgatccattctctcagacgttggcgggggctaactcaccatgatcggcagcgtgggcgataaccagattaaggtgctcctcactgtcctcaattccacaaattgtgaatagctctcgtatcttctgggctgtcagacccaaaatggccttatccatggcgggcgatgatgatggcaaaagacaaagactgcgtcttttgtcaatgaagacagaaatccttctggaacgttcggggcaacggttgccctctggttggggggagggaagaatgagccaattaaatcaaacacaggcgaggctcacaaaaatagtatcaaccaggctaaggcaagacttgaccgggattgaccccctctttttgttgtgtttgtgtcggccatttgcatatcaaagagcaaacaaatcaaaccatactattatataaatagttctttccgtaaccttcaccatcaggataggtgtaacgcctatctggtatatgccttgcgcgcaaggacaggacagagctttagggaatattggtatctgcgcctgaattttcgaatcatatcctcaggcgtctctccgtatagtttattccaaaaatgggactgttctcgatgcgccaaaacactgaccgcaggaatgaatgtgaagccgatgcatggctgcacgatattccaggctgagcaatatcccaaatcatgtgcgatgtcggtcggatgtggtgaggagtcgatttttcgtagaaatcgaggctcgactcaagacgttgaggtgaacatttcgggtgttcaggacacgggtgagcgtccatgaatatgagtaactcagatgatttcgtgattgactccgagtcaactgttgaacagttgaaccggaaatggtaaaggttggttatgttggtcatttaaaagtggtgatgaaaagcaataaacggatggcaggtgagagacgcggcctcctggacaagagtacggtggtcaattactgccaattactgccattggccgaatacacccacgcttcctgggccccgcacactatcacgtgtatctcctaaaccttgagtcgcgctccaagttaactgcgtgaaatcgtttaggcctctgtggtcggtcgatcttatgccacgtattcaatgacagctatttagttaactaaaaaaaagatgctttccacgataactgcaccgcagaataaatgagggtagaataatagcgtgcaaggagctgtaaacgagtgttaaaggccaatcaatgctggtgaaaggataaaggtcaacgggcaagagtaggtttacagctggtgattaaccaattgaattgattgtccctcggcaatctgactacgaaatggtcgaaaagaataacaaaccgattaattcatttttttttaaaaaaaacgcagtgaaagaaatagggtgtttattgagtatgattggctacgggaaactccccactattaattatcctttggcatgcccatttttccgccatattctccaggcctcaagtaccgttcctgttctaactagttagtacctgactagttattttggggaaaataaaataaaaaaaggctcttaaggcgagaacctcaggctagctacgctatacagttgaccgaattttccaaagcagacattcattgtttacttttggccctcaaaatcagaaattccttattattaacggacctcgacgtgatacattctacatttacgttcatcacctactagagtgaccgtttcggatttttgctggtcataaactcggaaacccgcagtttctggagcgcactcctcgattgcctctagccgtggttttcaacgtaaattcggcccgctataaatctattacctgcggggggaccgtttcaggtatttgttggccatgaactctgaagaccacggtttctagatcgcaccactccttttcaacgcgaaaacccacgaatataaagaggaccgttttgtacgtgtttgtagccttaagaatccctaagagccacttcgtctatacctacgactatttaggttgccgtttccttcagtcttctctaacagtgacgcgtctctttatatagcttccgcttcttccgcctagtgcaatcgatctaaatcggtcagaaagtctaagcgccaaaaataaggccgtcgaaaatcaagccttataaaaaaggtggccgaatatagtaaggtgtgcgatgctgacgtctgtgttggcatacgccttcgggaaaccggccaagtctttctcttattagcggatgcttcgggattttaggctttctttggctcgcaattagtatatttctatatctctgatgaaaagtcgactaacctatcaagaactcctactaaccagccccaaaactagtaaccgaccaggatctaaatcttattgataaagatacgccggaataatatacataaagtcgtaacatgaaagcggtacttccaccatactaaaacctttataattaatgatttgtttgctttcatcttagtcagcgacttgaaacaaccattagtggtctttcttaatagttcaaggtagtgagcgtacatcaagaggagcagagctgatctgtggcctagcccaaacgggcctagtgaggggtacaagtatcttggcggtggggcgagagacaatttctctgtgtaacacatggaagccaatttcgaatattgctgtaaagcacgatgagctgtggttccgaagtggattgatcttccatacgcatgggttctcaatacgcccgaggatcacgggaatctaaatggcccaagttatatggtcggtttatcgcttgtgtaattcaccgccgtagcaacaagtcgatttctatatgtatgattaggcctattgatggattgatgggaagttctcatgaagattgaagttcagctcgcgccccagccccagcttgttggtctcaccgatcctgttcttgtagaagttcaagcttcgctccatgatcaccgtcaagtctccgaggatttcggaggattgccaactttacctcgtccccttcctgggtcaagcacaggtatgcggcagctctgcggttatcttattacgttgactgatatttcccagacaacccgattgacgttgatgctctcagtgacccagatatcgaaactcgcgtctatcctcatgacttgccccgcgccggcgacagtattggtttgttgaggtacttctcctgccggagacaatgaactgatcagcagctaaagaacccgatcgatcttgatgcggactctgtggcagtgagcgatacaactaaaccccttcccagcttaccagcaagcccggccccagttgaacttagaccagatggtgaggaacgacttgaacaagcctcagcggcaaatcaagcctattttatatcgacctcttatccttgcaatgatgaaaagtagtccttcacctctcttcacacactcagtctacttcgcaataagaatgaacactcttctaaggcttgcacctaccatgcgggcaggggccttgaccatcacaagtctcagccggaagcaagtcaaagattttgcacaaaattccactagaaaggcccatcccatacattcaaggctcacgactgctggccacaagtgttcggtcttgaaatcacgggcacagtcttatcatcgggaaggaggttcctttcaaccaacccagttaggtgaacttcgcttcttccagataccgttgccatcgtccaaggagaacttttaaccttccctcggggatgatgctgagcggcctggggtggtgccacccaacgctagactgctcttacgaagactgatttcagaggctgattccagactgccaaacagggggaccctcactgctctcggagaacttctttgtctagacacattccacttccgaggatagctcccataacaggcagttgaggcctacattctaagttatcatatcaatcacgaatccttcagcctccgcaatgcgtggggaacatgatagtagagtttctagagtgagaggtctaccatagatgtacgttgtaaaacagcctactagaaaactctagaaatagtacaatacaactgtcaattgaacagacttgctcctcatactgaacacagttctttcctgaccgcaacaaaccactactgcttacccacacatacatagtagccaagccacaaattcttgcagccatctcccacatagggattccacgcgaggaagtcggcctgtgagatcccgtactgcgttgcgatacttgcacatatgtctccatcctcaaccttgtgaaactgaatacagccatcgaccatcttcggcaaggtgggcgttggcgtcgcctcagaggtcggtgaagggctcagtgtggtggtagggctggggttagagcttgggctagcctccacacagacataattgtcaagccacagatttgtacaattagttcccacatctgggttccacgtcaggaaatcagctcgtgagatcccatattccctcgagatcgttgcgcagttgtcaccgtcaaccaccatatggaatttggtgcagccttttgtcatatttggctgggttggggttggagtgaccacgcctggactggtggatgtgggtggaggggtaccactagtagacgtcggtgtcgagcccacgcagacataattgtcaagccacagatttttacaatcggctcccacgtctgggttccatgtcaggaaatcagcttgtgagatcccgtattccttcgagatcgttgcgcagttgtcaccgtcaaccaccttatggaacttggtgcagtcttttgtcatgtttggctgcgtgggcgttggagtggcgatgccagaagtggtggttgttgctggagagctatctgttgtgctggcactgctcgaggtaggcgtgcagcttgtgggaatggcgctcggggatggggacggaactgggtctgtagggcccaaatcacaataactttcgtaaagcgaatagcagttatccgatagatcatcctctgggataaagccgttattctcatcttcggcggtaatccagcagtacttggttcgttcagcgagaaggcttgagagtgtggcgtttggcgtgaatgtgggaatggaaggcgtgtagtttggatcaatgataggcgaataccatgaagtggtgatattatccattgtggttaccggagttcctggtacccatgaggtaattaaagaagacggaagcccggcggatgttttatttgtgctgtcggggaggctgaactctcctcctcctgggggcctatttcaattagaatagctccatgccattgggacacgacttacgatatgcaaatacttcttcccaccatcgaatcaagattatcgcagttttggtgtattgttctgaatgcttggtgagtccgctgtcaaaaagtcaagtcgaaggtaggctaacgtacggattccatcctatcagttgcaccaatccaaatgactgggctttgataatatcattgcatgtttgattctgctgcactgtaaacacagtacaggtgtcttggatgcaaagcggcgtcccagaaatgagcattgagcatgaatagtcaagtttattcaccttgataagctgatcggtactgacagagttagctttagaaattgacttgcaagtatccccttcgatcgatatataggtgtggccagtacaagtcggtgtggcggtggtcgatgttgcgcctgttggcgtggataccatcgtggtcgccgttggcaaaggcgtgtaggtatacggatagctcgaggctggaacgctgcaagacgaaagcaatgacgagaaggcggctggcgggaacttgttacgtccgtaatcagagctcatcatgatcgagccgtacttcagggtgcaatcagaacacggggccttggttcgattatagagatcagccaaacagtacccagacctggacttggtcagtgtctattccagggcctatacggcctttccgcaggagatacacacgcgtcttggatacacatcaggctatacgcccacaccaacccatcagctaccaccgcgggcgattgcgttgtcgtgctattcttgtataactggtactccttctttccgcaggccgaaaggatgctctcctggaaggtctggagggaatcgtgacattctttcgtgcaatatgtcttggcagccaccccaaccagtgcggccccattcgcagcatcctgtgcagtaacaaggctgttcgcgcaagtcatattgtaagttagggcatttcgacaatcagaggggaccgcggtagggatgtcatctagactgtcccagacctggatcgcagcaacattttgcccaaaaaagggcaaaacgaaggcaataccgacactggtgagaagcattgcgttcaatgtcaacaagtcaaaaaattttaatggtttctaaagtcagaattcgggaaaagcctccataactgtgtctcgcgggagctcggaagttattcctcttccgaaaaaactataataaccgatggatggtcttataacactaagacagcgctagagtaaggtacttacataaattagtaggatgcacgaaatttggcccccatcaaaccctctcggataacggattggggcttggttagcttaattgcactactgcacaagtaagacatcttaggacccacttaacccacaaacggagattaaatgaagcttcttaggggcagcaggatcccaaccctcgaggttttctttcttggcagcgcactaagaggtgtgatttagcagtagttcaattcttccacggctatacggcactgaagttggggtttctcattcagttagaaacggagaattcagctaaagcagccaatctattattttagagctaagaggatgggcaagtcgttgatattccaaatttactctaggaaaaatccccctccttcgttcactccttttcttgctttcttttgtcctgtcactctctacttataaaatatttccgacagtgttgagttatccatacccgactcgcttcacccgtacatgggatcatggagagacccttccatttgctctggaagatgaactctcttacctggccattgctgtttatctgtttgatattgcttcagcttccctcggctattgcccagggacctggtgagccgggaggcacttgcacagattcaattccatgttaccaaggctgctgtagcaaagactatgcatgtggttttaccgacgctcattgcgggactggttgcaggagtaactgcaatgcgacggcagagtgcggagagttcgctgctccaggtaattctgactgtcctattaatgtctgttgcaggtaagttagcggtccgacccagggggttttcgttctaacgactaacggttggcagttcattcggatactgcggtgtcacttctgaattctgcggcaacggttgccaaaaaaactccaatggtgggggttgcggcgaaccagagtatgtctgcttcggccgctcatgtggaatataagtactaaaaccattcagtcgcccgaaatgctccgagaatactgatgccatgtcctatgatcgacgtattggatattatgagttgttcaacatccataaaggatgcaatgtgattgagccagagagtctgatcattgagccgtttactcatatcaacctggcctttgtcaactttggtgacgatttcaagttggaagacgagtacggcgacgttgtggaccgggtgtcgttcttgaagtttacccacccagggctgcgggtcaacatcgcggttggggggtggacctttagtgatgctccgacgcagcacctttggactcagagtaagtgactcaattggcaatttgaatccatgcgcacactgacgctggacgcagtgacacgctcatacgagaatcgtcagaccttcatcaactcagtggtcaaatacctgaaggattaccaccttgacggtattgacattgactgggagtatccgtccgcatcggatcggggcggagaacctcaagacgcggcgaattttgtgacccttttgggtgagctgcgggaggccttcgatcgcgagaatcctggctgggagatctcggcgacactcccaacgagctactggtacttacgcggatttgaccctgctggcatggctaaatatgtcgactacttcaatctcatgagctacgacctgcacggaatgtgggaccaagacatcacatggactggtccttacctcaaaggccatacaaacatcactgagatcgacctcggtcttgaccttctttggcgcaacggcattgacccatccaaggttgtctttggctttgcattctatggtcgctcctttaccatggcagaccccaattgctatcaacccaatggcaaatgcgaattctcggacggtggaatacctggatcatgctctgacacctcgggcatcctgacatacgccgaagtcacgtcaaggaacaactcccttgatgtccatacgttctatgatccggagacaacggtcaaatataatgtttacgaggggacccagtggatctcctatgacgatgagcaatcatttttcgacaaaaagaagttcatctccagccgatgcctgagcgggtggatgatctgggcaatcgaccaggatgatggcgattttgacgcacttgccggagttattggcgaggacctctcagtcatgcagatggagggtggtggcttatccggggatgctgccaacgtcctggccgacgcctttgccgcctatactggccaaaactgcttcgtcacaccgcgctgcactgacggctccagtggggagaagaaccccgaccaggtgtgcccatcaggatacatgtcggtcagcactgcacacaatcccctgcaggcgggcaataaggagctccgtggcgactgctctgagggatggtatcggcacatctgctgtcccgaggatgccatgcccaagaactgcgaatggaacggggcgcccgagcgaagcgagttcggctgcgacggcaaatgcgggagcaaccagttcaaactgaatcaagacaccgcgctggacgccaaaggtgaagggcaatgctttattggcgaacgctacctatgctgcgattccgcagccatgttctccgattgcaggtggaccaattgccaagggccgctgatgccttccaccccaggcgaatgcccggcagacaatgatgccctgacattccgctgggataagccggatggcaagccgtggtgctccgatacttacgtatcgtctgtcgacggctctgttggtagcccgctgcacgaccgcttcaaaagcgagctctgctgtccatcagatcacagttttagcgtcagtggttgcgcatggaccaacaccctttcccaggctgacatgacagacgacgactgggcggaacatctcacggatctcgtctgtaaaccgcgtccctgctcacctggaaaggtaaaggtagctggtgcgctcgatccgccaccggcgacgggcgcaggatccaagtcggagattaactgcgctggagtcactatcccgcctggcagtaatcctgaatggtcgttctgttgtgatccaccgagtcgatacgacaagaactggcccgttgatcccaagtacctatgggaaaaatactataacgaccctaagaagtcggatgtcgtttgggaatacagcgatgagtaccagaacaacaacatggatagcgagccctctacggaggaggatggcagcgacgcctatggatttgtgatgctcgacggacccgatggatccatcgacaacgacttcgcgacgtcgcataccgttgtacgtcgttcccgggaaatcccccgagtcaaacgttccgttttaacaacgaaccaaactctcatggataccgtcttcgaccacgcggaggagacattccatttttactgcgactatcccgcaggatcccacgaatgcgagcgtgtcttcatcgatggcgccgaggacacaatcatccggcttccagaccatgtcggcgacggcccgtttgcccgaattgtctccatgaaaacagcccacgacgagtatcaacttccggatcatcatttggaacatcggtcgctcgagcgcaacacgaaccccgtctatgaggtgaagatagactataatttccatctgattaagctcaagcgagatgatgagcccgtgaacattcgcgtggactatacgaatctgatgggatactgggatgaaatgaccaactcgccagctagccgcgcgaaacgtggccttggagaagagggcctcaccaaggatgagtggcgctcccgagttcaacgggccgttgtacgccacggtaatatcgagaagcgtagtgaggctattcatgtgaaaacaccaatggagttctccggctcccacctcgacaagcggtggtggggtgcgttcaaagcctggctacagaaactggcatgtattcccctggtgactgcgtactctttgctccaaatacatactaacgtccatgccagactaaggtaaccaaatccagtttgggcgtgatcgaactgggattctccaagaccatcaacttgttccgggcgcaatggggatgtcccggccagacattctcagctaacctccggatggatttggaagctgacctcgtgatggatgccacttatgcctactatttatccgccaccttcatcccccccggcaagcccgaaacgtttgcttacttcggaatgaatccaactgcttatctcggactccacatcgagggaaatgcgcagatgcagacaacaaccgaccgcaagaagatcattgacaccctttcctatcctggactggccgtgaagggaattgcggcagtcggaccaacactagacatttatggcgaagtaagactttaaaacctcccagtagatatgcatataaactgacatcgatccagatccgaggcaaggtaactttgcatggcgaggcgactgccggagcacaactgtccttcgggaaggcggaggtttactggccgcagaatgatgatgcaaaggataagtatgagacactgctagggctccaaagtgacgtacaggcgcccgctcctggttctgttgagccagtctttgaagcaggtgtggctctggacgcgcaactcgacattatcgtaacaccggaggcacatgttggtatcaaaatcggcggcgggaaactcgtcggcggtgctaccctaatggacgcgcagttaaccggctacgtaatgggcgacttatccttccaggctcacggtgattatgacacgactggtaacgagttcaactacagcttcggagcgtacctcttctacaatctcgggtacaaggccacggcccaaattctcaacttcatcgattgggcactagcgcctcgactggcatacgacccgcgtaagacgttcaagctgtacgagaagaagggttcaatcccaatgtcgtcatcagctaaatcaaagcgcgaggccgccatcgatggccctttgcaccggaatcttgtcgaggtcggctcgttgaccaacggctctatctctacataccttgattccgcctcgggtttgtccaaacgtggtgatgaaatggatatcggtacgtgaaaagtcgccctcttaagtggcttccaaaagtgtcccagcgctttgagttactgatgattccagatggccccaatgctccagagtttacgcagaacctcaagtgccccccgggcaccagtggagacgttcggctgcccgaaattcgatgtaagccaacccagcctcaaccaaccctccctaaacaaaaagtccatcattctttccgattatcgttgctgactgaggacagttaactgtgacttcctcaacgactttattgaagaaggcaaaaatggcaaaatggatgctattaccggtctctgtacgcccgtgctgaacatccctgacaataaacgccagaagctattcaccttctcgaatgacaaattaaggaaggaggcacgatataacgcacaatgtaaatcagggacctgcacgcaggcaactactgacttgcgagaccaccaggggaataagaagctggagctgcagtgcgacgagttcccctggaaatcttccgagcaaggcggcgactatctcgctagtgacgctcgcacaggtacctgcgtggcatcttaccagaataactggcatgggcaatgtcttcgtaagtcacgtcatggtctgttggtcacctttgtaggactttgctgattggttcctatagggatgataggatacatgcaatcaaactgggccaagcttgagcctgagagggaagacggagacaaccgcggcgacttctggcaggattggagagaggattgtatgacactatctttcactcagtcttcttttaaaaagatactaatgccaacccgcagcatggacaaaacctgggcagcacggatctaaaggttcgcaatacgagcagagactgaaggaataccccgaaaagcagcccctgcctgacggagtcaccacgcgagtaagtgtcaccaactcatatccagagaggtaaacaacatttctgactttaattagaacaacgataaaatatcctgggtgtttaaacgggactacgaagtatccttcatccgtcaagacccaagcactatcgatggtagtacgtggtggggagcgacgagtcacaagttccaaaagacgacccacagtggcccatcagggatggatgccatcttttgcgcgattaaccattttggccaggataacgtatataagttgccaaacggctataatggcctttgccgaaggaacaacggtagccccctcacaggttggaatgtcggcttcaacatggctaggtgcgaggtgaagtttgcgaaccccagtagtagtaacaagcgaagtatcggcacctttgctgggtgggaagtggaaagtgtgcgaatgctggatgaggacgaccatgaataggaggacaaaatagtgctagtagtatagaaatgtattctgatcctttgttttgattgccgctatgaaccgcgagactaaacgtaagattcaaagtgttgtatagtctatggtattaagcaggggaatctctgaatcgtataggatattgtaccgtcaacaattgtaggaattaacaaggtggtggtttttatttatatgtgcttcacgggcggactttgatgactaatcagttctgatatcactacatgcaaacagtgcaaaatagtgtttaacgtgtcattttccccgtgctggacaggcagggcctttccatctaccgtccagagctctgttttgttgcccatgacagtaatggacaaggcataccttccgcaatggggccagttacccgtcgagcattacttgatcgtgagtgtcttgcgccaatgttgttgtttcccctgcgtggctaatatctataaagaaacaatgggatcactcctcatctgagcctactggagaccagcgcctccgactgatccatcagttcttagatctagatgagattccgcaggaactggaccctactggtcatacctcggacacttacgaaacactgtcacctacggcctatgagattgacactatccttcgcccctggcgctctgatgacctacggaagatagcgtggaggatttgggggtgtcataatgatcagttgattttgttacgcacccactacaatgccgatgacaaccacaagatcacggaattagtagggtccgatgagctccacgaggagaggacagcctggtgggcacttcttgataatcccgaactcttcaattttggtgaccagtggtggcgagtcttcgatatcttgccagagttagccggccctttgaatggttatagccgcctgccagacccagaaagtatctcacgggagagacaggattttaaggagagactaccgaccctcaaacaaagcgacgaatggacggcgaatcgtgataattatattgaaagagagtttgcataccttcggcgaatagcttcagagggctatcttgctattgcagatcaggaagcttttgaaacagatatgctacggttaatctattatgatgggaagaggaatattgtccaagagacccggacagaattcgatgagcagacatttgctgatgttgccgttgaatgggaccagttgtcgcttcctatgcaattatgggaggacggaaagactggtgagaagtatcgagtgaatggggagctgggaagggagttatatcagctagatgaggctgatctggaataagcatggccatgtcgaatctggtggaatcgtggcacatgatatcgttcgtttgctcgttggcgtcatgtatttaggcgccgcctcttcaacagagggactcttcatcatctttatcgtcaattcaatcgtttatcgtcgttccaactgcttaaacatgtgagcgttactagcgccaatatgatagcaggttggaatcaacgtacagattctcccggaccccggctaggatgcgtattgacgggtcataatacatctggtaaatgcgtgcataagaaccaaccgggtacaccacaacacttttgacagccctcatgatgcagcttcctgtatgcccgaggtgattcttgggtagtgagctctcattggcttgcctgtgccccgatcttaccctctcggtttgaccaatgtcaaattgtaggctaagaatgagaagactttccgtctccttccccttgcaggtggacttgtgctaacagcctgattgtctgcagaggtacgctcatctgccaggaagcaagacaaaacatcagcattcctgcgcctttttccacttctggaaagacatcaaatgtcatccgcagacaacgaggatcacgcattcgataccagcagcctacgccacttgaaggtatttgaaaggttgcatgcttagccacaggtatgattcgggtagtggtataggctggtcggagttcaggagttgtatcatgtagacaaatcgaacaatgacctgatacacagaatctagggagaaagaggccgaggtacgcgatacgaatattctggtgactcatcgtcgatagtagtcatgcggaagggacagagagcatgcgacagtatttgtataggggagctcgagcagacaagacatttgttcgcgtggcattcgactcgagtgatagaaatgagggtgtcctgttatacgatccgagtcagcaaggattgatctagttggacgagttgtcgtagcgtacctgttcatggaaatccccaagtacgctcgagacgggacaatcagtttgcgcaatgattatatcggcttcacaactagatcacttacaactttctgcaatgcagttaccagccatgccacgtcgtattcaagctcatcgtaatctgcactcgcttcaaaaaagccgcgttggggtgcacaagacaatttgttgagacagtaaacgcgcgttacgaacccacttgcgataaacattgcacttccatggtggatgaatgtgtcgcgatgccagaggtccagggactccatagctgtatgaaggtggtgggacgagggcggaagacgcgatgaagcacgctcgtcggccgctaccttggtcttatcttcgatctggcggaataggccactcgcacagtatattttaccgtcgatgatggggtggccctataatagcgtgaagatgtcagcggtgttcgtggttagaggaataatgcttggcgcggatggtcagacacagcgcagctgtaggcgttagatctcacttaccttagcatggaaatgggagtctcaaggttctatgcaacgaagttcgcacatggatggccgcaccctgttgttgactcgctaccttggtttgcgatcttctacctaggacatgctgcattgttcgaagcgacggggctaggaatagtgtgtaagccatggctttgcgtggagcactgacggtagtgcaaggttatcagggccactctggtgagctcccaaaggttcactgtcaattatcagccagtagatcagcgtgggatcccataactcacatgttctgatagtcaacaccaggatgaagagaccacaagaagctgtggcccttgcactggcgtatggtcgaatgtccatggatctggttgtcccgcgtctttcaagtcagtacagtttcaaacaggatttccagacctctacatatctacagcataaaccctaagccgaaaacttgggttttcacatacctaaagtatgagcagttgtgcttcaaatttgaagtccatccagaggcgtgacagtagatcaactcagtcggctgctatagcagagacgacttcgcatagacactttgaccagctaacccaaatctaatatatttgattgactggcgtgaatgggacagtgaagctgcttggaatcacatctcttacaggcactgtctgatttgctggtccacaatgtatactataaatgtcagtacggtataaattccagtattccatcaaaagggagaacttatcgagcgcgtcagacacaagcctctcgacgttgcaaaaccaggtgaataatcgtagagtaaattgccggggatagaggacgtatttgtaggcttctcggtttctgtcaaccaccaacttgataggaggcgttgaaggacacatttcttgattgaggcctgttgagacccacgtgttgaatttgcagcaactatttgcagcgacatatttgatggttttacgtgcatatctttggttttcgtgttctacgtttttcttcattattatttttcctctttttctattgtccgcactatgttgccttctgcagaaagcgaccatgaatttgctagagctcaactgtctgtcgtattggatctctgccttcctagagtcaccacatcaagctatactagtttgataacagctttagttggcaggacgcatgaaaggaaaaaggaaatgcttaccaagaccatgccgaaataggaaccttctcacttaaggccaaataccagtcatcttcacgtacttagacactagtttttcaccttagggtcaacacgcggttacgtttcactgcctattgacatctctaccgcgatgtgtcttcctcaattgtggaaattggtacagacgtcggtggaagctacagtatgttccgaaactccaatggctatacagtgcgccccgaaactgatgcaaccacctaccctcttcgattgattctcgaggctccaacgccaaaacgcgctctatattgggggttcttccggagtacccctgtcagtaggatgtgtaagttattannnnnnnnnnnnnnnnnnnnnnnnnnnnnnnnnnnnnnnnnnnnnnnnnnnnnnnnnnnnnnnnnnnnnnnnnnnnnnnnnnnnnnnnnnnnnnnnnnnnnnnnnnnnnnnnnnnnnnnnnnnnnnnnnnnnnnnnnnnnnnnnnnnnnnnnnnnnnnnnnnnnnnnnnnnnnnnnnnnnnnnnnnnnnnnnnnnnnnnnnnnnnnnnnnnnnnnnnnnnnnnnnnnnnnnnnnnnnnnnnnnnnnnnnnnnnnnnnnnnnnnnnnnnnnnnnnnnnnnnnnnnnnnnnnnnnnnnnnnnnnnnnnnnnnnnnnnnnnnnnnnnnnnnnnnnnnnnnnnnnnnnnnnnnnnnnnnnnnnnnnnnnnnnnnnnnnnnnnnnnnnnnnnnnnnnnnnnnnnnnnnnnnnnnnnnnnnnnnnnnnnnnnnnnnnnnnnnnnnnnnnnnnnnnnnnnnnnnnnnnnnnnnnnnnnnnnnnnnnnnnnnnnnnnnnnnnnnnnnnnnnnnnnnnnnnnnnnnnnnnnnnnnnnnnnnnnnnnnnnnnnnnnnnnnnnnnnnnnnnnnnnnnnnnnnnnnnnnnnnnnnnnnnnnnnnnnnnnnnnnnnnnnnnnnnnnnnnnnnnnnnnnnnnnnnnnnnnnnnnnnnnnnnnnnnnnnnnnnnnnnnnnnnnnnnnnnnnnnnnnnnnnnnnnnnnnnnnnnnnnnnnnnnnnnnnnnnnnnnnnnnnnnnnnnnnnnnnnnnnnnnnnnnnnnnnnnnnnnnnnnnnnnnnnnnnnnnnnnnnnnnnnnnnnnnnnnnnnnnnnnnnnnnnnnnnnnnnnnnnnnnnnnnnnnnnnnnnnnnnnnnnnnnnnnnnnnnnnnnnnnnnnnnnnnnnnnnnnnnnnnnnnnnnnnnnnnnnnnnnnnnnnnnnnnnnnnnnnnnnnnnnnnnnnnnnnnnnnnnnnnnnnnnnnnnnnnnnnnnnnnnnnnnnnnnnnnnnnnnnnnnnnnnnnnnnnnnnnnnnnnnnnnnnnnnnnnnnnnnnnnnnnnnnnnnnnnnnnnnnnnnnnnnnnnnnnnnnnnnnnnnnnnnnnnnnnnnnnnnnnnnnnnnnnnnnnnnnnnnnnnnnnnnnnnnnnnnnnnnnnnnnnnnnnnnnnnnnnnnnnnnnnnnnnnnnnnnnnnnnnnnnnnnnnnnnnnnnnnnnnnnnnnnnnnnnnnnnnnnnnnnnnnnnnnnnnnnnnnnnnnnnnnnnnnnnnnnnnnnnnnnnnnnnnnnnnnnnnnnnnnnnnnnnnnnnnnnnnnnnnnnnnnnnnnnnnnnnnnnnnnnnnnnnnnnnnnnnnnnnnnnnnnnnnnnnnnnnnnnnnnnnnnnnnnnnnnnnnnnnnnnnnnnnnnnnnnnnnnnnnnnnnnnnnnnnnnnnnnnnnnnnnnnnnnnnnnnnnnnnnnnnnnnnnnnnnnnnnnnnnnnnnnnnnnnnnnnnnnnnnnnnnnnnnnnnnnnnnnnnnnnnnnnnnnnnnnnnnnnnnnnnnnnnnnnnnnnnnnnnnnnnnnnnnnnnnnnnnnnnnnnnnnnnnnnnnnnnnnnnnnnnnnnnnnnnnnnnnnnnnnnnnnnnnnnnnnnnnnnnnnnnnnnnnnnnnnnnnnnnnnnnnnnnnnnnnnnnnnnnnnnnnnnnnnnnnnnnnnnnnnnnnnnnnnnnnnnnnnnnnnnnnnnnnnnnnnnnnnnnnnnnnnnnnnnnnnnnnnnnnnnnnnnnnnnnnnnnnnnnnnnnnnnnnnnnnnnnnnnnnnnnnnnnnnnnnnnnnnnnnnnnnnnnnnnnnnnnnnnnnnnnnnnnnnnnnnnnnnnnnnnnnnnnnnnnnnnnnnnnnnnnnnnnnnnnnnnnnnnnnnnnnnnnnnnnnnnnnnnnnnnnnnnnnnnnnnnnnnnnnnnnnnnnnnnnnnnnnnnnnnnnnnnnnnnnnnnnnnnnnnnnnnnnnnnnnnnnnnnnnnnnnnnnnnnnnnnnnnnnnnnnnnnnnnnnnnnnnnnnnnnnnnnnnnnnnnnnnnnnnnnnnnnnnnnnnnnnnnnnnnnnnnnnnnnnnnnnnnnnnnnnnnnnnnnnnnnnnnnnnnnnnnnnnnnnnnnnnnnnnnnnnnnnnnnnnnnnnnnnnnnnnnnnnnnnnnnnnnnnnnnnnnnnnnnnnnnnnnnnnnnnnnnnnnnnnnnnnnnnnnnnnnnnnnnnataacgaacaaatcacggaattagtagggtctgatgagctccacgaggagaatgtagcctggtgggcacttcttgataatcccgaactcttcaattttggtgaccagtggtggcgagtcttcgatatcttgccagagttagccggccctttgaatggttatagccgcctgccagacccagaaagtatctcacgggaaagacaggattttaaggagagactaccgaccctcaaacaaagcgacgaatggacggcgaatcgtgataattatattgaaagagagtttgcataccttcgccgaatagcttcagagggctatcttgctattgcagatcaggaagcttttaaaacggatatgctacggttaatctattatgatgggaagaggaatattgtccaagagacccggacagaattcgatgagcagacatttgctgatgttgccgttgaatgggatcagttgtcgcttcctatgcaattatgggaggacggaaagactggtgagaagtatcgagtgaatggggagctgggaagggagttatatcagctagatgaggctgatctggaataagcatggccatgtcgaatctggtggactcgtggcacatgatctcgttcgtttgctcgttgggcttcatgtatttaggcgctgcctcttcaacagagggactcttatcttcaagcatcttcatcgtctttatcgtcaattcaatcgtttatcgtcgctccaattgcttgaacatatgagcgttactagcgccaatatgatagcaggttggaatcaacggacaaattctcccggaccccggctaggatgcgtattgaccggtcataaaacatctggtaaagtcgctccctccagaacagtttacggtgacctccttcgtttacgtcctcgtctcctctattcatctcggaagcgcctcagagggtaaattggtcctgcgacgggtacgtcgcaatgacagtctaggatctcttcaaatctctaatcctaccacagagtcaatcactcaagaccaactcctcgcaaaaagatgcacctgaggccagatcccagcaattcccgcagctccacgcacattgagagagtcagacattcctaatggcataggaatgaaacccgattgatgagggaaccatgtacaggtctcaactatacgtatcactctgttcagcgcccctggccagcagcagccgcattatggcctcatgtccgttggatgatgcctcttcaaacgcactgccgcggtctccaccccgtacgttgatatcggcacctcgagctagtaggatctgcacaaccttttcatgcccctcggctgatgcagcttgaagtgcactgtggagcccttcactgtgagaattgatgtccgcgcctcggtctagcagaagatgcacaatcttctcatgtccttcagatgctgcgacatgtagtgcagtgccacactcctcatcattgagattgacatcggcgccccaatctagtagaatctgcataatcttctcatgcccttgaaatactgcagcttgaagtgcaagtgacataattctcactgagattgacatcggcgccacgatttagcaaaacctgcacgatattctcatgacctccaaacgccgcgagttggagtgcactactcgactcccaattggcattgatatctgccccccaatctagcagcatctttaacgtgtcttcaaaccctttagacgatgcacacatcagtgcggtaaggccgctttttcccggggcattgacatcggcgtcacggtccaacagcatccggacgattgcattttgtcttttgttcaccgcgtgagtaagtgtcggatagacgggatcgcctttgatactccgatctgcggcttgcatactgagatccgcaccgtggtcaagtagcatctgcacaatggtttcatggccattggatgatgcaaaatgaagcgcagtactgtcatactcccctttccgagcattacactggcgcctcgatctagcagtacctgcacaaccttctcatgccctctttgtgcagcggtgtgcagtggattccagagttccccttcctgggcatcaatatcagcaccgtggtcgagcagtgaccgtacaatattggcattcccgctgaacgacgcggattggagtgcactgcctttatccaagtccgaggcgttggcgtctgcgcctcgatctaggagcatttgtacgatctcttcgtagcctcgatacgacgcagcttgaatgggaggactgtcataatattgcaactcttggtatttctcattttaatgatactaggaggaggtgattgctctagcgatcctcgcctcgaggacttcgcccaagtaatgtcagctaccttgctctcctttttgcttattctcaaagtgaggcgatatctggcattctcatcgcacttgcgtgcacatactatatccatgtatgcaatatcctaccccacaccgagttgggcggataggttcgtgccggcgtgctggcgggctgtcatatgtatgagatgcatactcgtctggcaccacgacaaaagatagagacgccaggcggcacgttctgattggggttttaaaggaatgtaagctacgttgtgccaataggatccgttgtctgcccctagtgcgggctgctgcatccgcgactcgaaaatcatagaacgaggctcgcaggaagaacagggccacgttgcaaacctcatgcaaggcctgtgaggtgttaagtctgactggagtcccaggaaatcgttgacctcggtaccaaagaatatcccaggcgaagatgactcgggttgcagcttgggacgctctcgaccttcaaattcaacgacgggaaggggcgtgtgccgtccaaaatctatttctcgtcgaaacgagcggatggcaaaatggagaagcagtaggcaacgttgtcgggtcaagtagctcggcccctttcgagataattgtccagatggctgtgtcatgatatcttttgaggatttcctggcctgcaaggaaagcattctcttttttcagcagggagactgctcgcgcatagtcaagcttagagatatagtctatccattctcgaactgaatgtgcttgacggtgtctcatctcaggagggccggatactcatcatgaccacgaaccataggcttttctcctaacttcctccctccctcgctcgatggcgatatactttgcttcattacgctacttgggtgaattttctggccactttctggttcgagcccaatactcgacaggcaaaacctgttgattggtctcgctgaagactgtagtggcaaaatcatgccagaggttgcaggtgctttcactctgtcaacgtgtaatgttcaacattggacccagcgttactgtacgtgatcggcgccctcaattaattgagcgcgttgaaatctgtcctcccggccgtccgccaacgacctcaacaagcggaagcccttaactgctggagacatacatcttaccaggcatgttcagtccttacgcaggataccgaatgctcctatgatgagacattacgttcctgggaacgaggtgtctgttcctacgaaagggttgacatttcacaggaatagcgtacccatacttgtgagtttatccactttcaggagtcttacagctgttctgtggagttgcctcgcaccgagtccgtgctcttgatagtctgcattgtggcttatgtggtggcttcggtgtatctttaccaacgagctccagaccctggtggttactagttttggggctgtacaatacgacaagttctcattgtgaggtgaaagcttattgtggaggagagccagtcggccactaataacttctgggagctgtaggtcctctgagaattctccatacgtgtccatgacagttgtactataggctgcgtcgatcgaagatattgcaagcgtcttggttggcgagtgtgggttttcgtaagtgtgttttgcacggtcatgttttgctactccaaggtggagaaaggagtgagagaggaccaatcacacgttatatttccccccgacacgcccattggatacatggttgtgaagcgccttgttttagacgacatgatttatggcttgctggactctctagtcttgtgcggaattttgcagatgttgattgccaggactgaggacactcccgcactatcactccaaatataccgtgtgattggttcaccgctactcatttctccaccttggagtaactaaattatttgttccaagaggtaagtcatatatctgtaagagtggtatcatatgacgtatagcctctcctaaggcttgtgctctccggtgatgtctcatataaacgtattactctcaagaggatcctcacaaaagggtttccctctgaaaacagggcccttaatacgttcttttcaagctatcgtgattccagcaacgcatgattgtactctcgtgatagcctgcttatagtgaaacacacaaaatcctctgtacgttatacatgcagaaccaacagatgcctctcggatggtaaaatgtcctgagacgtttctctagtaagtacactcatgtttgtacaaccaaagctcccagggtacgacctctcggtccggagctatacagttcactcccgggagctgtaggtcctctgggaactaagatttttactcctgggagcaatcataagcgttgtcaaggatatacatgaagcatacggaatggatggagatatgatctgcgcgggacccacttagtgtatatgggttcccctgaacgcgagaaagctacctttcttttgcttcctcgcgctacgtcttgtatctagagtcaaccatagttgttcttaatatcgattgttcatcttgaaacactatccacctctatgtatacgtgagaccctcacaagcatgcctaggaaccatgccataggtcctggggtcgaatatgatcccaggaacgtgagtgtcgcactcgcgagataaaatgtggaatctggaatgggtaatcaatattagaaatacaaattgaaatgcgggcaataagtgcgggcaacagaaagaagtgattaactgggccaaaaaaaggtgaaaagacactgttcgaagagagaaatgatgttgatgaacgataaaatgcaacagttgtttgggagttgactcaacgacgctttcctcgacacatatcagtagaataaacgaaacgtcatcgactagtggatgatagacaaacatgagggtcaacgggcaagcaaacttgtagccggtgattaaaccaatgaattggttgtctcagaatccgagtacaacatggtcgaaaataataaataaacgaattcattcattcgttttcttgttagaacaagtgaaagaagtaggggtgtttattgaatatcattggctagacaacagtctctactctaaatcacgcgcatttcctaatacctaggtaccccctaagtctactgtaagaatttatttcaccctgctcaccctaagtttgatgtcttcctagataggcctgtggtatgtccacttttctgccatatttcctatgtctccggcctaagcgctcttgttgtacctgttggctaataacagttctctataataattaaaggaagccatgtactgaagctcagcgtggaaaattcttcaatctttatgagaacttcctatcaatctatcaataggcctaattatatatatagaaatcgacttgttgctacgacggtgaattatataagcgataaaccgaccatataacttgggccatttagattcccgtgatcctcgggcgtattgagaacccatgcgtatggaagatcaatccacttcggaaccacagctcatcgtgctttacagcaatattcgaaattggcttccatgtgttacacagagaaattgtctctcgccccaccgccaagatacttgtacccctcactaggcccgtttgggctaggccacagatcagctctgctcctcttgatgaagggtcctcatttctcgttcgtccaaataatgactggaatgactgggtgttgtgttttgactctggagtctataagacttggggattgaaacttaggcgccctggtaggggtcaacatttgagtaataaaattcttcagcggtaggatcccgaaagcgattgaagatagggccaagtcagccgcatgttctcttagatcgaccaaaaccctgcccagtgcctccatcacgcgtcgttgattgccacccacagtccctattttgtgaatacagtacttccaaaagggggaacgcatctcagcttgctaaaaccaaatcatggaccgccgatcattaccgaacgagcttatcgaagcgattctcaggcaagtagacatgcaaaccgtcctcctcgcccaacgagtctgccgacaatgggccctatgcatccgagcatcttctccaatgcaacaaattctattcttccaaccagcaccagccaacaggccacgccaacaaaaccccctgctagcatccaaatttccatactggtttcccgccgatgacactaagtcatgtgccatcgcctttggcgccggcgacatgcaggatttcctagagagcagcgacatatatcggcggccggaggcgagctggcgccgaatgcttgtccagcaaccacctatcatggcgctgggatgggtggagcgtagcgtgtcgccatccaacgtgatagacctgcatcgctgggaaattccactgcaagcacttggtgggttacaaatgaacatactgtacgatctggtcgtgaatacttcggaggttgcgccggaatacttctatttcagagtcttatggtcgcaaagtaagactttaagcagtagctttgctagccttcgctcagatccatgtccgtctttcaattcggacaggatcgatgggccactcaggcatgcaatgcagggtgcggatgtggttcttgatatgtggtatacaagtcaaatgaaaaatcatctctggaagggatggtcgaaagatacgtggacatgggagcttgtgcgggggctgaagcttgctatggatgactttgatattgatctggtgcgctgcatgagagagccgaaggaagtcaagagctggactttggcggaagagttgagtgactacgctagagaagtaggacccgtcgaccatgctatgcctttgcctgatgaggatgacccggacctgtaatgttaaggatttggaagtatctgaaactcatgatattatttgatgttatggttctatggtcgtagcctcgtcatcgctatgcacagtagacaaccccgagtctgccttgaatcgctatctcttcgacggaccgagcttgtactcatggagtatcgaactcaggccactggtaatcgtcataaatttgcgagacgggtcgtgcaccttttgtctttcgagacgaacggcgaatggaatggtcgtagtgtatgggcgatagaagtgctcgaacagaccgcatctgactccgtaagccgcatcggtttgagggcaggaggatgtggtatatacaatgattcaacgatctcagcgtatctgctttctgatgagcagagctgatctgtgacctagccgaaatgggcctagtgagattcactatcgtcttggcggtggggcttgagatagtttctctgtgtgaaatgtggaagccaattttaaatattgccgtatgcttactaccttgaactattaagaaagaccactaatggttgttttaagtcgctgactaagatgaaagcaaataaattattaattgtaaaggttctagtatggtggaagtaccgcttttatgttacgactttatatatgttgttccggcgtatctttattaataagatttagatcctagtcggttactagttttggggctggatagtaggagttcttaataggttaatcgactttttatcagagatatagttggaaatatactaattgcgagctaaggaaagcctaaaatcccgaagtatccgctgataagagaaagacttagccggtttcccgaaggcgtatactaatatagacgttagtattgtatatcttactatattcggccgccttttttataaggcttgattttcgacggccttatttttggtgcttagactttctaaccgatttagatcgattgcactaggcggaagaagcggaagctatataaagagacgcgtcactattagagaagactgaaggaagcagtaacctaaatagttgtaggtatagacgaagtggctcttagggattcttaaggctataaatatatacaaaacggtcctctttatattcgtgggttttcgcgttaaaaaggagtggtacgatccagaaactgtggtctttagagtttatagctaacaaatacctaaaacggtccccctgtaggtgatagattcatagcgggccgaatttgcgttgaaaactacggctagaggcaatcgaggagtgtgctccagaaactacgggttttcgagtttataactagtaaaaatccgaaacggtcactctagtaggtgatgaacgtaaatatagaatgcatcacgtcgaggtctgttaataataaggaatttctaattttgagggctaaaagtaaacaatgaatgtctgctttagaaaattcggttaactatatagcgtagctagcctaaggttctcgccttaagagcctttttttattttattttccctaaaataactagtcaggtactaactagaataggaatggtacttaaggcctggagaatatggcagaaaaatgggtatgccaaaaggacatctttcttggtgggtagggtgaaataaattctttgtagaagactgggggctggggggggggggaagggtttgcctgggtaataggaaatgcgcgttattgggagtggagactgttgtctggccaataatattcaataaacaccctacttctttcactgtgtttaacaagaaaagaatgaatccgtttattgattcttttcgaccatagaccaccatataattactggctgcaaatttcttgcccgttgagctttaagtttccactactacggtcttatatagtactactgtgtttctgttctctttacagtattgctgatattgtggaaagtatcgttgatgtgtatggtctctggcccgaaattagttcagcctggtacctctgctccattccgagccctcggaccaaactgggccactggaaaacagattatggtctctagagagacgacactaataggatctccgaggccttaaagcctagactattacaaaataggaatctcccgtcaatgcgtatattagcgcagatcattgtgtggagactaggttatggcactctaaagtggagctgggagtaaaatgggccaattaagcctagtgcttgctattcccagatgtggccgcaggtcctctgaggacgactgaagggtctctgaggtcggtatcctcttcgtgatgattctaaataattctaatgaagaaacttcagctagtttcgcggtctaattcatgagacctatgtctcctttctctgagtatgcgcttgaggtttaaggagcaacaaagctcccagggccggcttcttggagctaacggggcagtctctagggtcgacttcctttaaggatgaggatgaattaagaaatatcagaggtagtttcatacacaggccctatcgactttaggaacgtataggctagctctgggagtttcgctgctcctggaacctcaagcccttaaaactttctggtcctggtatgggcaaatttactcctaggagggtttgaaagctcctaggatcgcgggttagctcttaggggtgtaaagtctgtctctgggaatatgagccgcccctcctggaaactacattgatcctggaactctaggttaagttcctagaagccgctattggcaatcccaggattgacgaagatgcctgggatcagaattctttcaagtatggatgaagaaactttagcgtagtttcgtgtatggatccactcctttcttttacagcctcatagagtgcgggaacgtattggctagtcccgggaaccccactaccactggaaccttaagccgtccgtagaggttaataggggtctccgggtgactgaagtgcctctgggatcgcttagagtgtccctggtattgatgttagggatatacggagtatgtgagcttatatagcattagctctatcagccctaagaacgtgtaaattggccctaggagctttgtgctcctggcagatatatgtcctcccgggatcgagtggaatgtctctgggattggtatctacgagggtttctagtaaatatccgcgggttcatatgtctccttttcttgcagtcctatgagccctattttgatataagtaactgtcacgaggtatagatagctaggatatgctgtctattcggagcaatctaacttaagcttcgtacgttggggactgagctatagtaatgacgtcactcgaccttattggtggtgataagtggggctcggtgtagattcataactcctaagtcaaaatggactatatacccttaagaatgcaagggcttaatattgaataacgcgactgtacggtctaccatgtcggctagtcctataaggactgctctggtggagagtatatcaccgctaacgcagacccactcgaatacttctaattcggaacacgaccgttcggtgaagctgagcgttgaagtcggcatatctaaagacgaggcatataatccgttgtagctaggatacctgcctgggcttgaagcacaatatagttaatgcaccatggaaattttaaagcatatgataagctaattagctcaattttttttttgaggttgatagatggtgggaaagatgaggagatgggctgatctactagataagacgtatattcgttcagaatattatgtatacgtgctgatattctctcaatttctaaaataagtgcggtgtagaaggtgggtaaggataaggtattcgattacatttagctcttgtcccgcttgacatggaataaaggatctttttcgcgggaatcggcaatgaagaatgagggtatgaatattgaaatatgaggtatctaatgcgggggatataacccctcgagtatctatacaatttttaagtgatggtaatgaagctctttttttgataagtggtttatctctggcatttttgatatatttctgccggctgcttgattctactgagtatttggatggagggctaaagtacgtatatgtcggtgtgggccgtattgtaaaatgtagggtctaattaatggtgttcaactctctgtattgctgtatcgactttcctaacaatttatatgggccgtcaattactaatctaaaattacaaaatgtataggatcaatggatcctccggtatgccggtatgccaatgtatctattccgatagtatatttatgcctgaggcaccagttgactctgagtttagaggtgagtaagctggatccctctatgacagtcctttccccttgccgaacagtgggctgcctactctgttaacttcattcgattatctgttgaatacttcttttaacaatggaccgaggaaacaatcgctgaattacgatgtcagcttgaaaaataataaaggctccgagaagcagcagagcgcagctagagggagagagtacggcgactctaaccctaaagaagggacttgttgccctaagggaaagagtctgtacggttggtgatagttgcaatatgtcatgcctatcgagccaaaaagaaataggttaccacatccattgtatagatttcctatcgctcgctatgttcgtgccttcgcttgtgagattataagaatctataactatgttgcttagcctcctgctaacgacgatatgcttgcttctatttccgcgactgggatagtacgaggcttaagagcttattatgtaggaatgtatcttttaactcgttgatgtcgcagagagcactatatttaagggtgatcttttttctaatgtgtggttgaccatttaggaatccgtgtatcccgctctatattaataatcctgccgttgataagtcgaaagtttggagggatgtaagggagcttaatgattgtgctatccgtgttgccgtctgattgtatagagtctgtttgaggtctgttttctgggaggttgtagagtgagaagtttgtattaaaagttttgcgctttgtaggaaaagcttactataacagtctctgactggactaatttgcgacgcttttcccttctccgttggctttggattgcaatctggtagaggtcttttgaggctagatgtaggcttggtattttccggcttatatactgtaggttcagtcagcctataggagttggtagtatttgggatcgtttgctgtaggtcctcgtctattttctgctcgattttcggtccctaaaatgcctgtatgcagtttggtagaagtaatcggagtgagatagaagataagcactctatagggccgatttgttaaacagatatagacgagtatgtgggaaaagtatcggtatataggttttaaacttaggttggtgctattttgtttaaaccaggaggatataaaaggacctatttatactgtctaaggtgcctatcgatcgtaccttgtgattgaactaaagtaactaccagtacctctcgctggtggcgatgatatgcttgtcgcagtctgggtgcatagtcttcggaattgtctcgtataagtagtatggccgagatagccaactttctatattaagcaatatcgatctatctagacggggacatcgacatcgatgtccagtcctagggttccctcattctaagctgtatgtctatgggataaggcccagcctaagggtattaagtgtatgggtgtctgggtctaagataaggctgatcggcgaagctggggattggatggctatcaattgttcccggtaagaagctatatctggctgctgggtggtcatttaaacctacgttagcctggagcgtcaatcttttgagtactagggttgagtatggggatgatcggtgaagttgcggatttgaatggctatcaattacccttgagaaggtgctatgttagtggttttcgcgtaaaggcctatctagctgcctttagggcgtaaagcgaggctcgctggaatcaaaaatagtgactctcgttttattgaagggttctgtggaggctgtacacttgtggggaagacatcgaaatgtataattcagattgttgattgtcgataaagctaatactgaagaaagctatgtaatacggaagaactccaatatccttgctaatatatgttacctagggcagattgtataaggatgatatcctgtacgcgttccggcagggatatatggctcgagataggtggagcattgagccgcgaagcagctattctgatcgagaacgccctgtaatattagctgatttcggatgtataagcggacagtctttgtgcttacagaaaagaagggccgcttgatataccctggtctctgcttgataaatcactacgtcagtcattaagcctatgaaaaaataatagacgacctacttatatacgataagcttcagccctctaatgcgcggatcattctggatattacggataaccagcggattctgcaatatagcaggaatgaaacgactaaggggagtgagtgaccctcctcgaaactccaccctagtggtagtctcttcgtctcttgcgctttcgtcagataaataagttatggtgctagcggggtgagactcacagtggtatgccttcggtagagtattcttgccaataaatgaagaaagtacggcttaggttggccattgggacgccagataggttaaattctgggttaacatcgataattctaatgttgaagaatgaaagtgagggtattccggtaagcctgttttgtgttgagagattttgctaaattatagggctcgaggaagaggccttatggagtaaatgaaaatagagttgtttggggaaccataggtgcagagtgaggagaactatatattcaagctgtcagtggacgataggtctaggtaatgccgcgagatttagggtgattggaattaattctttctttcctcaaaatcattatgtacaatacccgctgacagaataggtcgttgattattttagtgcctcacgcgtgataaccggcgtttggattacgaattggtagagaggcttgaggatttagtattttccggctcatttatagtaggtttagtcagcctataggggccggcagcaattgaggtcgtttgctctaggtcctcatttattttccactcgattttcggtctaaacaaaaaaaattgcttgtgtgtgtagctttgtagaagcaatcgaagcgagatagatgacaagcactttatggagccaatttgtcaaatagattcaaatcatgtagacgagtatgtggtaatatcatcaatggagaggtttcgagcttaagctggtgcttctttatttaaaccaggaggctataaagggacatatttctactgtctaaggtggctatcaactgcgcctggtcattactaaagatctagccatggtgagtacccgcccctctctctggtgacgatggtatgcttatatcagaagcccgccccgattcctgtccaaatcctctatgggccggcaaaaattgctttggaggcaatgctcttcttgagaattgtatctctatcactcttggaatggaggccctcggaaaacctcagctaagatgctgaaatgttgctagatgcctgcaagactctgagaagcaggggatcctaggaaccctatctcgaaaatgacttacacctccacgtgggaaatatattacccgatctcagttatggtgctgttctaatgctagcgctgatgacttggtattttgatgctttatcttctaaagtatcgcagggcttgattgttttcttgagttggccttacgatagtgaagtgaagggaatactttaggatcgatattgaagtataatgtgcggaatggactcctcaaacttcgactttttgcttgtctggaattgagccctacctagtgatctgtgtaactggtaaatatgaaatgtattatatctgctttgcttagtagtaaccgagctttctgaaacggttataaatatcatcgagacattccttgtactagtcctttaaaatgttgtggatcttaaatccgagaaccttcccaagtttgtacctttttgtatattcctgcaggtatttggaatgaaggtgctggtaacaaagagctttctttgagttgagatcttccactggttgttgcaaaataatcggattatcgccgctcagaggaacgaactttgtaatcccatattttcctaagacccgtgaaatactaacctcaagtaccgtaagatccactaggaatgctttatgctgatcgccaagctcttgaagagcaatggcattaaaaaccatatcatcgagaccccttcttttgatgtcttccataagtgtgagtctattgggatgaaactaaattcgtacggtcttgtttggttagagcttgtgttaatgtggagaaagggtgacttatatgtaaacgaatcggtactgagtttttggcagaaagactagagtctttcgtagatttatgtatgttacttcgattgggatctgggcctctaaataaaagcgtttcgcgcgagttgcctggggaaaagaaaaaggaggatatgcagttcgaaaaaatataacgaactctaggtaggctcaagtagactatggtcttgcagtcgtgaaatcctggttaatgattcggataaacctgaggaacagtagtttatatcatgatgatctagcagacttgtcatttcttttgcatatgctactgattataggtctaggacagtggcttggggctctgaactacctggtacagcgaaataaccgtttagtctccaaaacgatctatggctggcgaagcgatccgtatgtgtataagtagaaactctactttaagatactctatgcctgaataggtttagatctgaggttagctccgttccctgaaatctaagcctttttaggataatccctgtactcctatttagataaataccagctccgctagccacttagatttcctttcctaaattgaaatgcatttaccggaagaccttagagaacagcttacatttgcccttggggctgtatcaccgatatatatcatttcctaggtatcaaatacttttaaatttacaaaaactgtttactactaagttaagaaaagggctgggatgggctatttaaggattttttctcaaggggaataaagaatgaattatagtagctgctcctaagagaatacctccttgtactaacgatatcgtccgcctcgcactcagctaactctggtccgagttcaagtcccgattgtacctttgctttcggcttagttgagaattctagtaaggccgcagcgagcgaagtggtacgcgatattgttctaataccaatgtcgaactccagccgcggcgtgaataatcctgtttgtactccttcggcctatgcttaaagacctatctcattttcgagtacctgtaactatacctccgtgtacgattttacgcctaagccgcgccccaggcctgagtcacccttacgggtttctaacaatgtgcttcgagctatctatgctatgtgtgaggctaaaaggcatgatactacctattatgattctatctggcttggactgcagaaaatttctgatgactaggatgttgaagaagttgcattgaatcgatatggccggatataagtactgtagtccaggaacgatgctaggggcgatatgttcaaatatgcccagcgtttcagccttttgcttggagcttaagaattgcaggttatagagaaaacactactaccggatgtgtgctctaggggtgtaaccctgagatctgctgcaattagcaaactggccgaatacctcctcgttgaaaaacgacgtatattagatgaaaacaagcggcgctctcattacgtttcagtatgtgagcttttcggccccggtgccctttttttgcttggagattctgatggagtactttctctgtaggttacctaatgaggaagagatagcccatttcctgttcttacggtttctagatgggaaagagacctgaatgctgaagatatggaatctttatacaaatatgtcatatgtcatcttaaaaattggatggctgactgtaagaagttgaacgaaaaggccgtgaccttagtgattgaaggactccgtgcttgtgggtgggatggacgcttgtaccgtgataccacatttatgaaatgcttggctggttatgtgaatctggaatctttactctccgtggcgactagatatgatgaagcactactaagaaaaaggaaatatcccgataaagaggtatcatcgaaacgctatcatcaggatatataccatgatcctatcttagatgaggagtatccgatatctctacgagtcgagttaaataaccgttctggtgattagtttggggaatcgcaatcgcaatcacctggaacaaattttggcacaacgcttgactgggactgcagtatcaacttgagcttggattgggaccagtttattgatgactagattacagaaagtatgaatgtatgattcgctggggattcgactggaggcatgagggccattttataatcggggatttcttaggtttaatcatcagaacccattggaaaagacaagaccaggaaaatccccccgccaccaggggaatggaaatacaccagatctcccctccaggccacggcgtctcccgcttcaaggtccaatgctaccttccttccaaggcgcgatctatgttggtgagacccttcgtagaatgtaaaccaccgatttgacggcgatagcctcgtaattgcgatggtgacgtatattctcggtccagctgtcatcagcttagttgggtcggcatctgtttcgtggaacatcccaagattcagggtctgcggtgaggaaggagtttggtttggataaaatagcggagcgactaaatctttgtccatattctgatcggtcagcgagtgctagcatggaaaaggagtgagtgatagataccctgaggaattcatccttgatttcgaacccagtctgaggtactttatactcgttgtatttgtcctttgtggcagttggtacattgtggatgagtccattttggaaatcatcggcgagttttgatgcgactgatgctgatactgcctgcctcagcacgacataaccgttcgaattggccatcgttctggatcgaccatgagagttggttttaaagacctaataaaaccaaatagccttcattagagataaaacagaaacttatgtattgtcatattaccttatagtatcgtcaaagtcgctcttgggggatttcgccataaccttagcactgaaaccccgcgatcaggaacttcatgcccaattctctgcttacaaagaactcggcggcggggtacaaagatactaagatcacgtggataaaacgtctcgaaatcttgagacaagttaaagcggtacccgtgcagaatctatgggcatctgaaaggaataaacagtagaagaagaaagaccaggctgtgcacacacaaattccgtcccacaatgttggcaggtaaatctcaagaggccacaaggactttcattttgggcatggctggcgaaaccggcttctctaacctcaaacggctaataagcagtaaagtatttaatcacttttaaaacaattaatcactactaaaacaattattcaactcgtctgctatattacatattcattgcacgcacgccgactatcgcgtatccgttccgctctgaagcgatgagtaagacctttccggagtcgccgcagctagccgcatacatgggcctgttgtatggatatgaggactctgaaccctcagaaaggcccaaccatcggtcggttttggctaagccttctatctcattgatccttgtcgtcgcctactgtcagccttagctgtacttaaaccactatttttgacatagtcagaagtgtagcaagcatgaatctgtttctgatttgataggcgctagaacatattcgatctaccagcatgatgacttattgtctctttggcatcgtgcgctttcgttgtctctaaaacaagacgttctattcttttcctggcagcagtaccgtactgtaaatgaaatcgtgtggtacgataactttgcggtgatattacaggcgacacgcggttcagaacatccatgtttagctctacatgattgggcgaagaggcaccagatctaaagatcgtactgtgagaccgaataataagggaaagcacccggaaacggagaatcaaaagagtttgtattcatcaatgtgtgtgtccataatacagtagctgttactcagatggtctctaggcagacggcaccaacaggctttccgaggcctaaaagctcaaactagtacaaaataggaatagaggctgatcggggtttccctgtcaatgcacattagggcaaatcgttgtatagagactaggttatggaactccaaagtggagcaagtctagtactagccattctcattagttggcaagagccaagaaactaatcagctagcaatattcaagagacgatcaaattcaaggagactcgtacgaaaatagaaaataaaaataaaggagannnnnnnnnnnnnnnnnnnnnnnnnnnnnnnnnnnnnnnnnnnnnnnnnnnnnnnnnnnnnnnnnnnnnnnnnnnnnnnnnnnnnnnnnnnnnnnnnnnnnnnnnnnnnnnnnnnnnnnnnnnnnnnnnnnnnnnnnnnnnnnnnnnnnnnnnnnnnnnnnnnnnnnnnnnnnnnnnnnnnnnnnnnnnnnnnnnnnnnnnnnnnnnnngacttgtacgaaaatagaaaataaaaataaaggagaattagcagcagtttcgtaatgggcgtctcgccgtgaaatgcaacctgcgcacaaaaatttcatttgtacaccaatcagcgtcaaacgtgcattttggcgcgcggtaccttctatgcacgtagacacatgcaacaccaacttggcatattgacgagaatggtctgagccatgatgaagtccttgatgtttctgctcaacatataaagagacttgtacgagcgtaacagcccactcatcagacctcaatagctttttcagttaccacaacatttcaaaactctttaaatatgtctttcagtgtttacacggccgaatatcttggtgcacctaaccatgaagccatttacattgaaaccaatcccaccgccccccgaatgtctgaaagaggacgtctctatcatgtcactggaaatttactccagggtatgagatacgacccaagaggttcctttgaccctgaactctcggcgtcttatgttccaggcacgaagaaaattattggatccattgcacacacagatttgtccagatttgagacggagtgttgcagagcagtcgaggcgcctcgagcccagttgacgcttgggggtaaacagttgtatcctggtacaccactttatcgttgtggagactggttgcgagacgttcagaaattggcatttgaaaagggcatcttaaagcggtagaatgaggtaagtcaatcaagtccatttatcaaggtacaacctctgacggactggatccgaaagcaagcgcacaggtacttcagagcccttgtaaaagatgttctttctacagctggacgtatttcccaacatatcccgactctgggtcaccagcgcaattttgttctttcctcgtgttctcccatcgaatctatgattctcactatatgagcgggagattcacagtgagattagtttgaacgatctcttctctccggttggggtgttgaaaagaggccgagaggttggtttcgcgtacaagaaacgtaaaatgcagagtctatggctttccttttgacgactaagaccaatgttttatattttcccaatgtaccatcagtagaagaccgacgagtagacaacttgcatcattaggtattcaaccgggtactgatcaaatatatccgggataagctcaagccagtccggtttcatttgacaatacaaggttgaattgcaaaaatcccaaaattcggggtaccagcctgacaaattccagtcgatcagagtaactttgaagtctgcgtctccattgttgcaaaccccttttcgctccacaattatgttcttcggttgcagatctccatgagtaaagacaattcgatggttcttgagagtgcggttgaccatttctttcaacaatcgaatgtagtgtggagactgcatttggcccagtctctccagtattccttggttcatctgcttctggtccttgaatggcccggaaatgattgggttgttatcaggggttgaaagaacaccgtcgatgtaaggcgtgccattcaagttcccaaagtagccaggtgatggtattgctcgcagttcattgatcgcctgtctgatcctctggctgatcgtcgtcttctcagttggggtgagcgatggcagtaatttctgcaagtctgtaccagggacgaaatccataacgacatatcttttctgggtctctgggtcgatgaagttggcgtgaacctttggcacaggaaccttgctgttggctgcaacaaatttcacgttctcagcttccaaaggcgggatcgaatacccgattttgaccgcgaagcgttccttcactcgaaccactttgatggcatttgttcgtatactaaggacatcggtcgatgttgattcatctgcttctggtccttgaatggcccggaaatgactgggttgttatcaggggttgaaagaacaccgtcggtgtaaggcgtgcaattcaagttcccaaagtggccaggtgatggtattgttcgcaattcattgaccgcctgtctgatcctctggctgatcgtcgtcttctcggttggggtgagcgatggcagtaatttttgcaagtctgtaccagggacgaaatccataacgacatatcttttctgggtctctgggtcgatgaagttggcgtgaacctttggtacaggaaccttgctgttggctgcaacaaatttcatgttctcagcttccaaaggcgggatcgaatacccgattttgaccgcgaagcgttccttcactcgaaccactttgatggcatttgttcgtatactaaggacatcggtcgatgcctcaatgtcggcaatagttggtagttcaatgatcgattgaagctcgttatccatctcggtgaacaaaaatgatgccgccgaagtgcaacaaaggatttcacgggctttatgtattgttcgacaagagcaaacagtgcaaacataacaccgtcataacacgtgatgaattccagtcggccattggtttatcacgggaaaagaaagggcttgccgcgagtatgacaagcacgaccagcgttaggcccaaatttgccagcatcagctgatactgttatggactttgactgacgtgctgtaccctgcataggccccagcgagttggatttcaggtcacgtgacgtatatagatctgttggggtggagtgaaaaatgtataagtcgtgcaacagaactattgtggatcctcacgaaaggatcagataacttgaatggacagagtgatctgagaagactaggcagtctgagtggacagagtagtctagtgttactcccccaattttgttttaagcggtacttcgtgcgtgattccccacctcgctcccaaccactccttgaaaagtaattgtattgatttgatgatatccctcaactacccccttggccgccacaaatatatggtagaagtgtgcctgtcagtaggcgacgactacaactaccgagtactttgttaaccagttagttagttaatgcaaaggaggcctggcaacaacgcgaccttagtatctgagaaggtctatcagagggtatgccacgtagggtgctggctattactgaatcttattgacggtacactgaatattagtcatttgaataattactataatttttgtgcggtagaataatggcgggaaatggcggtgactgagagggttaacagacatggtgctgcctactttggtctagtggcaccctcagcgagagaaagagatacgctaaccgcattttgaccatctccaaaacacattggaataccaggtacgtgagccagggcaatgacgtcgctcgaccttacaggtggggatcagtgggactaggtggagattcgggactgccaataaaataaaccatatgccctcaagaatgcaagggcttcaaattggaccgactggttcggattactactggttcggcgaagctgagcgttgaagtcggcatctcaaaagatgaggcatacaatctgttgtacataagacacctgcctaaggctttaattaagcattggtgaacggtagtcaacggcggggacgagatagtcaacgcatcaaagaaatgttgagggatatgatgagacgatagttagctcaatttttttgagcttgatgaggagacggaccgcactttattggcattatggaaatttcagaacgtttacacagtgggtaaagacaaggcggttatatttatctggcatcccacttgatgcggaataaaggatcgttttcgtggaagttgggcagtggagaactaaaaaaaaaagaggcacccaatgcggctggtataatccatggggtctctaccacgcaaacttcaattgaacaccagactaccgagaagctatattccttagcaaattgcgctctttctcatgttgaacattcgcttcttgtacgtaacaattctctcccttcggttggcttccgcggataacaccatttttagttgagttctaccgtgcaagaggaacgacaaaacagtaacttgtcagccctagacatacatgctctcaacacgactctcctcactgaattccttagagaactcttccttcgattccgcagccatttccaggtatttgtagctcactggttcttcacccactgtggcaagggcatgcacaattgacgtgaggtttttgatctgattatggtcagcgggttcataaactatatggctcgcgaaagcttctggaactttcgactagcagactaaccacgtattgcactccctatgcttgctcctagaatagcaacctaaggccaatagagaacgctagatgacgcagcttttctggcatttacaatgacctatagggaggacactagtgaacatcagtaaaagcagcaataagcgcagttacttgtttgccatacagaacttgaacagaagacttgcgcctttatgcattgcctctttagctgttaacgatttacctaaacgaggctggctcaccctagcttccctatggtagtcgcccgcgggagaaaatcgacactggcatccaggtcaagaagcgatgaaggtgctcgaaacacactgagtgaggtgttgccaatttcggtctagtggcactctcaacaagagtaagagatacgctaaccatatccggccacttacgccgacagggctgttaatcggcagccagtagggttactgagtaatctggagcttctccaagatggagcaagtagaagtcaggaaccaatcacacattggctcctctgatccattgttactcccccacttttgttttaaccgattttgacggcccagattctccatggcgccctatcaatactgaacagcccacgctttcttatgtatatcgagtccaacccgtgcttgactatgatattactctcggcttatcctactccgatggttttggctacagggaaatcaaaacaaaaaaacctcaatttccccggttgctaattcgtgaaatctagtcactaaccgagcatttcaatgtagctaccacagaagggcaaggtctaaccgatttccaagcgcctgtactgtctcatcctcttcctctcattttcatttagttttctggtatatgaagggtatgccaatggacagatttgaaaggaacgaagactgaggtctcaactcctgacgctgacgttggctcctcgatccagtagcatgtgcaccaccttttcatggcctccgtccgctgcggcctggagtgcatttccatagcgtccaccctgggcgttgacatcggcacctcgatccaacagcatctgcaccaccttctcatgcccttcctgtgatgcggcgaggagtgcactgccatagaattgggcctccagtggtgcattgccatattcatcaaactgggcattgacgttggcggctcgaacaagcagaatcttgactacctcttcatggcctccaactgatgcggcctggagtgcattgccatgttcatcaaacttggcattgacgtcggcaccacgatccagcagcatctccacaactttctcatggcccccggctgatgcggcctggagtgcattgtcatataacttaccctgggcgttgacttcggctcctcgatccagcagcatacgcaccacattttcatggcctccatgtgatgccgcctggagtgcatacccatatgttccaccctgggcgttgacatgagcgcctcgattcagcaccatacgcaccaccttctcatggcctccctgtgatgcggcctgaagtgcattaccgtaccgccctccttgagcattcactgtatccgatgaatcggcatccctagtgtcaatcaggaagatactgctcaggacggattccaatcccagcaacgctgcatagtatagaggcagtgctatattggcaaagggacggttataatccacattcatattccacggacgatccatgtcatgcaaccgtatccaggttacgaaagccttcatgtcgtctttgaaaagctttgacagtaatttttcgattgctgtcttcccttcttctgagtttgcataatgatgaaaccaatgtatggctgcgaaatgagcaaaagggaactcggtgagctttgcctcatctaacagtccctcagagagagctggctccaggaggtagaccaggcatatctgagctatttccgtattcgcaggcgcacttcgtatagcaaatatacgtgagttttgttgtaagatgcgatccgacaggagatactcctggactgagaaatgcgctatgcgaacagtcacagtggtctgcctattgtagtcttccgtggctgcggtctcgataagtccgaggcaaatgtcgacaaggtcatcttgctcatacgaacgaccttgacgatcaagccgcggtagctcactgagatcaactgcgtgtgcgtcgatgagctcattagccgtgagcggtcgggtggagaagcaaagtagagtcaaaacccgccgcacgtcctcgacatattcttcgtcgatgttgcacaagattcgctcgtatgtctcatcgagatcgcggggcaatgttcttagacatttgtcaagctggatctggttgcggacccgacttatggctttgaactgacactcgacatatctgaacctagaaacggttttagtcaaaacggtgggaagcatgtctccttattgtgcttacactccttgtgcacttgttgtcaattttgcctcaatctcattgtggcgcgctttccacctctggagtttctcgtcgttcttgagctgataagagacaaagtttgctatgtctctgtcgacttccgaattcctaagcgaaagatcttggtcgcgagaaggatgtaacgattcgcggatatctagctcgttgcgacttgtcaccaaaagatggaccccaggtatacaccaactgcgtatcatttgtatcgctcttaagacgccttcccttttggtgtctcgtgggctctcgtctagcgcgtcgagtagaatataagtatcgcagaatcgttcaaggaagcgtcgaagtgagtcaagcagcgcatgcgctgggggtgatccggatctgtgcaatgcatgcagctgttctagatctctctcgccatcttgtagctgtaccgatagctgcaacagcaacgtgcgtaacatgccgttgtcgtcttgcttcgcctcgtcgttaaaggaaaagtagaaaaatgcgattccgactccatgtttatgtctcgtctcatgaaatgtatgctggattgcgcttgaacagaggaccgacttgccacatcctgcgaaaccattcagccataggaaggaattacactcctctagccaagtccgaaagtaatggccgttgacgaaccatagacctgtgcttggatgacatttcgcgcacgtagcgttgtgattgagagatgcatctggcgccataagccagcagcgaatcgtgagtgaaacttgactagcatttgttcgctcgacaagagatttgacttccgatatgccatcctggatctcgctatggctttttagctgtaggacatcgagtgcgaatgacaggttttcacgtatgtcgctgacgtcttcttcgagtttctgtaaggtacttttccgaaacggataggccgcgcgacgtccagcaactttgacacgatactttaaatcggcggccgagtctttgtggaatttctcacattcgctctgtagctcggtgatgatttcctcgcatttctgtaccgccttctggacttctcggagtagatcttgcgtgtcggccttcgatcggcgttcctctacagcaatatcgaggcctcggaaaatgcccagaagattgtcgagattctgcgtaacctttgccagatccgtgtcttggcccttgtatgtagtgtaaaaactgaccaaagactgggtgacttgaataccaagcgaaagtagtccggcaacccctgatgcgatagcgagcggatcagccattgtgattgataatattccttgagacgggggatataaccatctaaatatgtgagatagccattatctcagagccaagcttcagcctcatcgagcaggggctcagctgctttgatgcccaaagcggggctgagcatgggcgatgataagaatagaatcgaatgagagttgtatcagtatttccaggaacttaggggatttgttatcatgtgattgcgtgttacaacagattacggaattttagaaaggaactaaatcaaagatagactagcgtatatcctcgctttgtgcaagccggcgactggtgcaggagatattgttctttttgaggagcagtgcgaaaaatttcaaatggttaaaagagccaatgtgtgattggttcctgactactccttgctcattgcggagctacatgcaaaagcgtagcgcgtgattttctttcttgtgaactaaggcaggtctagattctggtggactcgcatagacaatggtaagtaccatctcactaagtgcccatcctgtggtcgaagggataactctctagtgacgtaagagatgtgcaatggggtcatcacggagaaccacgtgattgtcacactaaagtacaagttgagccaatcagctatatcggtggaatgaaaattgccagtggtttgtctgcactaacttagttttgggccaagaccaggcgaatgtgcgccaccatcccatagcacctaccattgtcttcccgcctcttgtaggggaaccttgtcgcatgggcacagttttaaatgtggaggaacccattctacatgagtttcataccctccctcaaagcctattatcagtttgccagatcgtcatgcctcaacacttggcactgtatcgctctaccatcattccgaagatggatacagaattagtccataaaatttttgcacgagacgaagccgaatctgctccgccctgttttacgggaaatgaatacgatggccggatgggactgaggatttcgtctatatttgtgatattggttggttcgattttcggcgccgtcttccccgtcgttgcaaggcgatttggtggttcaggaatcccatcctggacatttttcgttgccaaatacttcgggtctggtgtcattattgctaccgccttcattcacctccttggcccagctgaggaggctttaagaaacagttgtttgaccggtgctatcacagaatacagctgggttgaaggtataatcctaatgactatcgttgtcatgttcttcgtggagctgatggtcatgcgatacgcacggtttggccaaaacgatcagcgcgatgttgagaatcacatacattcacacttagacgacgatgaggatgccactactgatgagagaaatcgagtggtgccgagatatgataacttggaccgaccctggcggcatcaggatactgaaatgtccgaaaaaaccggtatggaagggtacatggctcagctgacttctatcttcatcttggaattcggtatcgtctttcactctgtgtttatcggtttgactctcgccgtatctggcgaagagttcacaacctctacattgtcatcgtcttccaccagacttttgaagggctaggtttgggctctcgccttgctacccttccttggccgcaatcaaaactcctgacaccgtatattctggggctcgtttatggagtttccactcctattgctattgccattggcttgggtgtgcgtaaaacttatccaccaaccggtcgaacaacgctgatcgttaatggtgttttcgactcgatatctggaggaatcctcatttacgttggtcttgtcgagcttatggcgcacgagttcatgttcaccccttctatgcgaagagctccgattcaaacggttctggcagcacttcttttgctctccagcggtgcggcgctcatggcattgcttggcaagtgggcgtaggtcgcgttcgatcctgtttattaacattttccggccttgactttgacgaaatgcaaactttcaaaagattctctgccgatcctgtttcccccagaacctggtgcgacccctcaagtagttggcagttgcgacgtcgcaacaccagggctcgtcgcaggagacccatgattactgtattgcgtcccatgagaagatgagctgtgttaatcatgttacgtggttcctttgataagggttatgtgcatggtgggatgtatgacgtgtgtccgcagcctggtccctcttcttttactgttcctctaagagtctcatggattatgcacggtaccgctttaagttgtcaagtcaaaggtctttccacgcgagaccaacctgaaatagtcaaaaatgaatggcataaggctcggactgaccttgccatgtctggctggtataagctggagactacgttacggcacttcaaagtggagctgggagtaaaaatgggccaatcaagtctctaggatcgactagagtccccagggctagtatgtgtacagcaaaaagagacatggaccacctcagtttggaaaaatgaggaaatactgatcccaaagacacttctgttgatcctggaatggccagtggttgctctaggagctttacgtagggttccaggagcaatatagctcccaggagaggtgatctatagacgaacttaacactcctgggaagctgacccccgatcctgggagctttcaaatcctcctaggtgtaaactcgtccatccccggacagaaagcttttgagggactctaataaagcttccgcgtgcctgggagccatgccatggatcctggggtcgaatatgatcccaggaacgtgaggggtctcacgacctaaaatgtgggctccggaatgggtaatcaatattaggaatacaaattgaaatacgggcaataagtgtgggcaactgaaagaagaggtggttaacccgttcttggggaccgagccagagcaatgacgtcaccgaaccttatcggtggcgatccgtggggctcggtgggactcaggaaccaaattagcctatatgccctcaagaatgcaagggcttaatattgaacaacacgaccgcatggtctactatgtcagctagccatatagggacggctctggtagagggtatatcaccgctaacgccggccaactcgaacactactaattcggaatataaccagttcgtgttgaagtcggcttgtcaaaagatgaggcatacaatccgttgtagctaggttacttggctgggctttaattaagcattagtgagtggtacttaacgatggaacgacatagccaatggatcgggggaatttttgaggcatatgataagaagctatttagctcaaactttttgaggttgatggatcttggggaagatgaagaaatggttgatccactagataagacatatctccgttcagaacattatacatacgtgctgatattcctcaattccaaagaaaagtgcggtctagagagtgggtaagaatacgggacaaaggatctttttcgctggaatcagcaacgaagaataagggcgtatatattgaaatataaggcatctaatgcagtgtatctacacaagcttcaagtgatggtaatgaagctcctttttttggatgtgagtggttatctcttcggcatttttgatatatttctgcgggctccctgattctactagtacactttgccatcaacctgctcaaaactgctgatactgtcagagaccaccaggaccaagcaaggcttgtccctataaatacctcgtagacgttggccctccaagtattttttatctaatgatcattgcaggtcgtgtcagcgaacgagtgtggtcgaagctggtcgtccaaagaaggagctctgatcgtgtcgaatttcgccattcctggccacgcgtaggtgagcgaaaggccatcaagcacagacatagtgttcttgcaacagaaatcttcagtagctgagaataatattcatcttctgggttgacttcgctgttgggatcacagaaaaagtaataaagcgtgctaggtgtatcacgggaacatggagtaggacacgggcaatcccattagtcacataggaatactcgagtccttctggatcatcacgcgatattcctggacaagagtggagcagacaagacgctccgcattgtacctcagcttcgcttcctggtctgtcgggattttgtcaaccagagataggagatccaaaacgtcttcgtgtgacgtgaggcagtgtgcttattttattggattagcaatacaattatgcatgataatgaagcatgaagcatttccggcccgcatccgcatgaatcagtcagaatttctatctattataattcttgatgcccgcttctccaacgcacctatatggcctctggtgatatacgattctatatgcattgacaaccacgaattgatcatccaattctggctctcgaacttgacttttgtgtgatgccatgaatcacatgaaaaccttaattcaactatgaagcttcaggaccgatattatggactgtcgtgtactaaccgaaaatattgcgataagcgcccaaccgctcgacaacctcgaggaacgagattgtccacatgactttcccaggtatgctattagacatacattccatcagcaggcctctctctgccaaactcctttgaaaatttctcatttgatttggcggctaacttcaagtattcgtaattcacctggttgacgtcagcctcagcgagagcgtgtgcaattgctgcgacgtttttgatctggttcatgattggtcagcaattgagatgttcagtgccactcggacacccacctctcgtccattcagagctaaagactccaatcgtcgaagttcgtgctcctcaacaatggcaggtccttgcatcgtacatgccttggacagaaaagttgaccagagatctctgcgaaactctctcgttaaattctcatactcaatgatcaagtgaatccggctgagaattgcgtcatcaaactggataccccgattggaagtcaagaaaagaattccttgataatattccagctttcggaggaaaatggtcacaaggcgattgtgggcatcgtggtaagatgtacgctgctccatgaacgcgtctgcctcatccaagagaagcacggcattaaagtgtttggcgatcttgaatactgtttcaagttgttgctcaagcgcattggaatccccgtggttgacaacaagttcgcctgcagatatctggaaaaatcagtgacgccaaaatcagccgagctggatggttcatacagaatagagggggagtttgaaatactccgaggttgcctcaaccgtgaaagtctttccgacacccggtgggccactaggacaagttaggttgggaagtcttgattcatagacgctttgccgacatacttcagaagaatgttgaatccttggccctttccatcaattacgtcgtcgaacggtaccgtcggtatcatccctaggcgggttttcgccaatgacaggaggatggtcttggtctctgaagggatcttcaggcaatcgaacgattcgggtgaccaatgcacgtccctaagagcactaactgcgcactccactggaatcacattagccggacaccaaaccatcgtcagtcgtgtcacatacagaacattttctccttgaaactgaaacagcaaactgttgggcaggcaaccagtaaatcggcctctctcagcttttgtgcatccacaccgtctcctcgcattttctccttctctcgctcacggccctccatgagcattgcaccaatgtcaaagactgcaattccatccttatccttgaccccaatgtcgcggagtgacggtcgggagtagtttggctgcatttcatggaaaaatgcggcgtccactgccactcgactcttgatgttgactttgatagccttccccttgttcataaagaatgcactgcctttacagtgccgaacgtgtgagccggctaaatcccgaaacttttgacccctctcgatcaggtctttccggacttgtttgtgattttgatagtgatggagagggaaggcctcaagagtctcgatcggctttgacccccgaaactttgcaacacgcagaaagattccggcttcgccaaacttgattccgtcataatcaaggaatcggcactccagattccaccacatctcatcattctgtgtgacctcttcccccgcgtcgaatacgacacatcgcggctcttttgtgccaatgcatctggtataaacatggcaaccaggcttgaaaagcgcccaaagaaggtcatatgtaatatgaccgtgctgcaacattgattcgagacgctgcgagatagccgcatatgcttgcttgaggtggtcgatgagcaaacagagatgctgtgccgctgtcgatctatggtccgaactgttgtccatgttctccgcgcgtctgtcgagctctgggaggaaatggaaaaggaaattttgctcgatctaaatctacgtcagcgtgctccttgatgataatactgtctcaattaccgatggcttgtcctccatcaggctaacggccttgatgtcgtgcagcacgtctcgcacgatgtcgcgtaggccttccgacttgatgtctatgaatggcactacctccttggacgtccggtctgatcatactattagtaggtcttcggtccggcatgcaaaggtgtcacgtaccaacacgttcacggacaacaaatgcatattcagcatagtcatccaggtcattgctagtctccgttggctcggcaatcttgtatttacatgcctcttcgtcccagctagacccgtgtcagctatctgaaaaagtggaaagggtggttggctggtggctcatacgtttccacaattgttttggattgggattttgatgcccatttctcaaaagacttgaaatcctccggtgtagtacggatcggattttcgagatcaatcccatctgccgcctgggcgttctctgcctgctcatcgctggaaaagcaaggccgagaaggctcagaaggctcatttgccacgggaggctcagctgaagaatatcctttgcggatgaccttcactaacaactgcttcagttgatccatatctgggcctggttgggaatggtcctggaagacaggagtgtttggaggttctcggttggtaagactgagcagcacactttcaaagagatgcttcagatcctccacggtatctcgaggcgtggtcgattccttcgttgggctatccggcggcgtcatgccttggtgacagggagacgaagtctttttcgatgccatgtgctctgaaagcaatcttgggctgctttgaacaggtgccatgctgtttgatggaatttgtttgtacgatggagaagaaagattgaatcaacacggtaaaagctgatatgaatgtaaacgaagaactcaataaggccgagaggttcctcccattttatatcttcgttgcccacccctgccccatgtgaaaccctttaacaactttaacaaaagtacgccgcagatcgcatgaacttggatgaacggtcttgaagggattgagttgcttgtgggagcaagcctatctctgccgtcccagacgggacggctaaggtggataggcacaaagaatctgcacgtctagtttcgagaatgcatgccttcaagactatgacgtaagaaagagatgcgaaatatcgtcgaataatcagcgatatttcgacgaaatttcgatgaatttatgcagtttaatcttatctcggatagagatttcagagggagtaaataattttacagagacttgggaaattattccaaggattctaatttattgttcttattatgttgatcttgaagagaagaaggcgaaaacttttggtctttaagctcaaagattattgtcattgttgcttgatcaggtcttgacaggagaccagcgcccaacccttcgggcaaagacctttgtcacgtgataatataaaggcggatttcttcctgcccctcacctgcccactcatctatttaccagcaatgcgctgcttgactcaaaggtgatacagccccaaatgacagtggtcattaatccttgacggaaaattcgtgttacttgaaaggaaatagctcaaaagcaacgtcgttggtgattatccttaatatcatcggactaagcggcgacgtaagtcaagcacgttcacttctcatctggcgtacgtgtaatgtattctaatatacaaaagcattcattctccccgggaagtttggattccaccagaaaagcgcacacagagaccagtaccatggataaggcagccaaaaaagttcgcaccgaaagctcatcagacagcgggattctcgaagaatgcaagaaagaagtgagaatgatatgttagatgttcatctgtgagaagaatactaattaccccaggtaacatgtgacttatgcgatcgaataaactggacgactccatcaaaaggtgttcagactacccctccaccgagaacggttgcaattgtcgtggatgttgttcagaacagaggcgctatacggattttccagaaagaaagcggtgaatacgttgacggagttggaaccgaggaggaaggctttcggatcatcattccatggagagacacttggcgcttcagagcatcgggcgtcgttgaagttgggtatataatagcaaaggatgcagattagtttggcggctggttccatgttgccaatggacggtgtaagattaatcgatccgtcagctcgttactgactggaattgtaacaaaagatgtcgtgttcactccatacgtgtcagtgagccatactgcgcctgatatctgaccagattctatgatatctcgaatatcttgcaagttgagctcatagacatctccggtcaaagggtctttaggtcgatttagctagttatcatccacttcgtgccaaggacatacctatgtcttgctgcttcccgggctgaaatgtcgacaaatccggcgatgtgactactgcaggtggtccttcgccatgttagctagtagcatgacccacaagatttaggtgttatactgaagatcggctgaacgatttggtagcttccttgaccccgctcctgatgctcgagagcgtcgtgagtctcggagacttgatggactgttccatcaccggcttgtaagggagcctggggagcttctgggtagagagcaaaactgaaatactgacgtgcaagccatcggagtacagggttgtcaaggtcagagtgattttggatctcatatggaagatcaagccgtatactctcctttgcgatggaaattgtcgaaagtcccaagccaatagcacaaagaacgaccatcgatgggccgttcagctgtcgaaccttgcggaggaagtcgagataagtcgactgtcggcctgctccgatggagtcctggggtgggtacccattcctcagtaatgtggcggctgccttgattcttttcctttctttttctttcacgccgttccgacgctcaacatatcttgaagcctggacaagcttctctaaggcactactaagagacagagtcatgcttcagaacaatgcaagtggagttttcgtcgaaaaggagcgaagagcgagtcgatgaaaagcgctaaataccacaaatcaatgtagcaaactcgagctttcgatgtcaaaaatcagtcgaaaatcagtcgaaaaggagacgaaaaggagacgaaagaccgctcttttaatagccttccccagtaaagtgggttgcagggctgtgctcttgtggatcgatgggacactagcgagtgcgtgcagctctcaccactcaggacacatacaacgccgtactcgtcattggttgatgctctttgctctgtcagcctagacacgctgaggcccgaaaaagtggggcagtcgtccaatttctggcttgagtgaaaagatcacagtaccttagtccaccaatcccacacgtgctaggaatacctcatctttcggctacgttagaaaaataggatggcgcgaggtgccacaattggatctcttctcccaccgacgtagccgctggtctagattgtgggtcaggcgccgagaaaaggctggccctgagacgcccatccgctaatgcatagtggtcacctcaaagcactggagcctctttcactaccctcagccaatcacggcatctgttgataggtgccgcagaagaaggtgctatgagcgactgagccattgtacaggggacacggtattcacatctcgtaggcagggatccccgctcgacctgtgcaaattcgtcctgggatgttcgtgatctaaggtataaatatcgcaggcaatagcgcaagggaagaagagcaccataaagagaggtcgagcagaacaagacagggcgggacaggacggaacggaacgtggtaaggtaacatgactctgcatcaccagcctcattggctaaaacccgctgagtgactatcatttttgtacaatcttcagatatctcccaaccagcgtagccgctgactgggtccagcgcccagcggccgccgctcgctcaccttgggggcgcaggacgcttcctctagagactccttataagtggcttgctaacatgtcacaggatcacgctaatgcatgggcggtcacttcatgctctggaacctcttgaattttgttgcggatctatctatctccagcttatcacacccaattcatgatatgcgccgccaagtcaggctcgagacactgaacatcgtgccgcacaaggatcatctcaagacatggtattcatgcatctgatacaagttcccccgcatctgaaaggaaaagtaaaagaaagaaagaccagcctgtggacacacatattccatcccacaacgttggcaagtaaatcttaaaagccacgaggactttaattttgggcatggctggctaaacctgcatctccaacttcaaacggctaataaacagtaaagtatctaatctattttggtttctctccattatttacgtctatgttgaaaatggcgcattggcgctctccaaaacaaaacccaaatgggcatggttttgattcgcggacgcccgtgcagaaacagcatgtaactaacaatgtggctcgaaaaaaaccttgctgccacgtcagtatagtttgattggatgggggctgccaggcaagtcacccttggtagttgagccttgcataatagcagcggcctcagacctgcacgcgcatctgatttgttaagcttaagcgccctactaaatcccttcagccccatttcttttgtagctggccgctgacttgtgatgtgatagctgcataaagaggtttatttcggaagattctctcacgtttataaaagctggctcctcgacagctttggtgaatcttactcccaactgcttttctcagcgaccacttgaactagccaacgtttcgtcaattctattcaacagagctgttgcaacaatttactatcgtgaataacaacacaaagcttcagtcgcaaggtaaatactcttccctgttctgtgagaaaacacctgttgacagcaaccagcaccatcaaccacatgccgaacaagtggaacaaaatcaaggacgccgtccttaaacatgcaaatggttacaaaaagctagtgcgaccaagtgttggtctccacaaaaccgctttcccgaagactgcggcagatctcgagagtctaggagtgcgcttcgacttcgcaggcactattgaggaaaatgggaagaaattccacagattccaggttcaggtaaattcgggtaacaagatcccaacttcctggaagcagtggagacaaaaacacgaaaaagggacacacggaatcgttgcaactgtcaaaatccccgacgatggcactaaggaagatgtccaggcggctcttgacgctgtcgatagtgagatcgactagatagactcccccttctcagaggcctaagacatgtcgagttcgcgcatcccggtgatgaggccacttttgtatctaatctgtgctcagtcagcatccgaggccatttacctcaggatctacccatagcacttacagtggtgttccatgagtatttgaccttgggtacttcgggccccgtcactttagacaacctactatgtttaaatacgaagttgggcattaccagctattaaaattggattgaatttccgtttctgcgaggcaatatttgaagtgggcctaagaaatggaccctagaccgaagtacccaagttcaaatactgtatctgtcgctttgcgattggccgaatgggaagaatcctaacatttaccgacagggtcacgtttgtgctgagtaatacgcatgttagccagaattcggctacgtaaccttggaagtaccctagtgcaaataataatagcagcttgggagcaatcttggaactgacaaccatctgcttgaagatgcgacgcttttcgagattttttattccatactcgaagtcgttacccaggaggatgtcctctatgcgtggtaagcctgatctgttcgagtacacttctgggcgctttttgtgagtcgtgacggcggttagctgttgaacgcgtcaattgcgataaactgacttgatgcgtcaaatagatttaacgaagagctccgccgcgctgaacgccgtattcaattcgacgtggatgctcttgcaagggcggcctgccgttctgtcggtcgacatgtcaaggacgtggcctcgatcacaaaactcgcggaggggggcttcaaccgtgtcttgcaagtcaccttcgatgacggatatgcagttcttgcaagactaccgtacaagacgactgtcccgaaacatcatgcagtggccagtgaggctgctacactcgcacttctgcgtgctcatggggtcccagtcccaaaagtcctcgcgtattctccagatcagacaaacgccgttggaaccgaatatattctacttgaaaggctcgaaggatcacccttgagtgaccagtggttctccatggataccaaaactcgggtcaaagtaatgagacagattgttgatttggagagacgattcatgagcatccacttcccagcaagcggaagtctttatcaccgccgtgatctcgacggctcacaacactttatcccagtctcggacgatatcgtcgttggcccaactgcacagcatgaatggtggtatcgagaacgggcctctctaaaggttgaccgcggcccatgtaagtattcatccaggagtgcgtgttttctttggggatattgactctgagccagggaataccttttctgcatgcttcgaagcacccgccaagcgcgagatagaattctgtgaaagatttggcaaaccacgcctacacgtcgagagatacctacgagaaatacaccagttccaaaagctctcacctattccgtaccaacgtcttcttaccaattatttagagttagcgccctacctcgacgtcccatccggccaccgcatgtctcgcccgactcttcgccatccggacttttcacccaacaatatcctaatgaatacgtccaacgacgtggtagggatcattgactggcagcacgcagtcattctacccctctgtctgtgcgctggaatccccgatcattttcaaaattggggcgatccattgtccgagacattatctaagccagaggtcaaattgccagaaaattttgatagactcagcaatgaagaacaaggaactgttcaagagacgatgcggagacggattgtccatttctattatgctgcgttgaccatgaaatccctgccggatcattttgacgccatcagaaccgaaaactgtatgctccgagcgaagctttttcatcatgtacaggctccctgggaaggggactctgtctcgttgaagtatgccatgttacaggtcctcaagaattggcctatgtcgctggatggaggagcacaaacgagatctgttgagtgtccaattcaattttctggggaagagatgcagaaatgttcggaggatcatcgccaagaacaagagaaactacaggaactgggcgagatgagagatctaatcgggacagatgccctaggctgggtttcagacgaggatgagtttgaacggtgcaggggtatcatccagagcatcaaagacggtttgatggaacattcaagcactgagatggagaaaattgcggtcctttcccatttccctttcgatgaccacgaagaaacagaaatgttcggaggatcatcgccaagaacaagagaaactacaggaactgggcgagatgagagatctaatcgggacagatgccctaggctgggtttcagacgaggatgagtttgaacggtgcaggggtatcatccagagcatcaaagacggtttgatggaacattcaagcactgagatggagaaaattgcggtcctttcccattttcctttcgatgaccacgaagaaaatgcgtgataacttcagatctcgatcttggtagataatatttattcatatatagcttacggacatctgaagatagcttgtcccgaatttgagcaacagatgatcttccacggcgattcgctcgtagttctcgagaccttgttctctactaatcgggaccccaatacctttgatggctacctctttgtggatcccacgactggggcctgcaatataagcagcacggtcacacccaccgaaaagtggctgccatttgccatcggagcctcgacatgccctggacgtcttgctgaaacaagaattacccaggtcatgttcgccaagatcctatacggcttcgacgcaaacttggagggcgtcgatgcgcaattatttctacattacgacgggacttgtggggctacagtgatctttgcttgaatagaggtatcgacaaaaaaatcgattaactattgtttctgctactcaggcattatttaatatgtggattgggagtgacggtgcgtaagtcaaggcgcagtggccggtggggcgagagtgaaatcaagggggcagctttgagtgcgaagtagatcggacggagagagcgaagaaaaggaaaagaggtgggagaggcaaggtcggctcttttatgttggagcaaagttgagaggtcatgtacgtgacagtatggcagtcgatagtggcaaaactaaccggatagtgttattcgtgaattacaggtccgtcgtttacaagactcacattatagccgaaaacagtgtcgccaatagcaaaaagtgagattaaaactgtgtttcagtgccagagcggcttagcgactctgcagggagaccattgccgctcttcgaaactgtgaaacctggtaaggtttaactgttgcccaacgcactacgggcgctggacccagcgtgacggtcttgtttttggcgatccgtttgactgatattcgacaaagactaataactactgccaactcaaacaggggaatagcggtccaccgtttgcctgcgccgaggtggaccgtatcgcggtcttgacacaccttcttcggtgcctttgctcttgccacccgcggcttgaactgcctcgcaaggtgcgcctctatatgaagattcgctcctcacgttggaactccgccgagaatgcccagaatttccagccttgtggcccttgaggcgtgtgcaatagcgcacctggagggagccttccgaccttccaggaaaatactctgcgattcgcttccatggcaggctccgctcttccttcaattcaatcaaaagctggtcatccttagacaggaatcgggttggccctgtcgttttcccagcgcgggaccccttctgggaggtttgcttggaatgctggctgccaattttgtttttatattgtgatgtagctctgcctgatctctgagagcaggaatgctctgcctgctcttcaaaggtaactgaatagatgacccttgacaaaagtatctgtcgcgtaaggaaacctcggataggaatcgtttcgatatcgtgcaagcttgttagggaagtatgatctgcggccactttggattgaactgcctcgtcgaccgagaggcgtttagtgttctgccggggaggtctagtattgagctgcatggtaggttgtcttgctctttttagccgacgggaaggaacgctgcttccatgtgcatcttcaccactttcgcccacgtagtccgcatcgtcggggccatcaggatcgtcgctgctgtcatcggatatatactcatcccggtcccgctttctgttcggagaggccattcgtgttattgaggcagagtccttcattgttcgctcttggggacggaagttggagatgacgacggacggctggtctaacactggggcatgatctaacactggacagaatcctgtaccttccactgttgggctgcatggcgactgcttcccactgtcttgaaatgcgggtgaggttgaacgcgccaatgttccattttgacgaggttttggagacgctgacaggctctccgcatcacgacgctgtagctcgccttcgttgtcatgagctgcagccctgtctttctcctggccaataaccacatggctttcggaaacgggctgtctgttgtacttctcggctggcatgcttttcccgatgacgcaagctgccagtttcgatcctgattcgtctgcttcaattccagcatctccagacagcaaatgcgttggagtggattgattttcttggcccgcagggtcaataatttggccattgaccattgtattgccgtctgctatatctattgtcgggttcgaaggtcgcaaaatgtctccttccatcgtggattcgtctgcattctaccacgtgagccagaggacagggcaacctagctgactgagagcactgacctgcattttcatatgcttctgcttggcttagaatttcttcctccgccatggggatgcagaggccatcacggaccgatgtagagtatagaggagtggattgctcaagacctcccccctggataatatcttgagaagaagatgtcacgttgttctcatggtgcccgtcaccttggaagtctgggtctcaaagtgcgaagtcagccctctattgtcgaccactttggcattaaggaaaaagagataggcacaatgaattcaacagagtgaattgaagaaattaaggggactcaaaatgacggccaccacgtaccatcgtgacgctgatcgtataaaccttgccctaaaccactgctggaaacatcatccggcaattctcgactcgccgtgtgtatatttgatacagcaacgtttgcatctcttcccgaagaggcattcaagaaatccatgtcaaactcattcgagcagtcaatggtcacttcttccgcaagctcgttgggggctaataacgtctcgtcttcactagatgcatggaaatgactttggaagtacggcgcatgccccgagaatggaacactcgaacgccagtgctggctgggtagaaacggataggctggcgggggtctatccgaaggtatctgtgaattgatacgatcgtgggacccgggtgcccggagcggattgatcggtgccatgccgcgagaaagattcagacgcaatgtatgagaatagaagagaaggaaccataaacagatagccagcctccttctcggtcccagtgaggagttccaacaaccctttatacttgcctaccgtcccctgcctcttccgagcgctttgggcaggtcgaatggacaagagtcatgagacaaagcgcagcctgccgatacgaggacccaccaacccatccgcaatggaattcacaaaggagtcacgcgcaaggccgacactgcatgcggcatttctcccattggatcaaagcgtttcatgctcggataagttcacggtctgccctactgcgcctcgccagaagaggatcatggcgaagggatcgtctccgaagggctgcttgcgtgggcatcagcgtccagtcgggtgagacatcatgcgcacggcggtgccgaccctctcaggaacttccgatagtccaggggcctcgatcccctttgctgtgcctcgccggaacagtacaattgcggcaagatcgtccacggaagatcacttggcgcagacactggcgcccagtcaaatgataatccatcatctgtaaagtaacgctggcatgttcaaggccaccaaaagtcgaagccctcacgaaaagaatcggggaatgagacattcttcgtcataggctctagacggtggataggtggggcgtaagagcagcaaatgccaatggatgcatatgtgtggcgagaactcgtgatcagcactagatcagagagcgccacgtcacaatcgtgctcgactgaccagccggtcgatcgaatctcctcgcaagtcaaggttcccttcccgggccagtcgtagatggctacgacgctacagcgggcaaaacaaacacataccagtgaaacagggaccagagggtaggcatgttggctgccgcccaagtgaggtcacagggttgcagtgcagtggtacaatctgagcatcagggcgaccaggagaccgatgaatggatccatctacagccagtcgagtggagaaagggcgcgcaggcgattacgaggaactcagctgaaacatggaggcgcaggggggagtatgccgtgcgatccggaattacggtatcatttcaccgctgggtatgacgggagagagaagagtgcagtcagtcaaagagcggaggacggtggagcgacgcactggaagttatatagtccaaaaggtgaagctggcaggcggtcggagatggcagatccccgtttagggatagccggggccgccaaactgcttcgggaactgctaaaccaaatcagagtccactaaaccagaacaggagcgggttgtgcctttgccatttcaggaaaagcgtagacgccaaaccaaagtgggatagaccaaacccaaacgggggcagtggaggcagacgccaaacccgatccaggggggcgccgaatccggccgcgtcggcacatatggtatttgtaccttatagactcctagggtttagggtagagtagtatcttacctataagggcttccttagcctccttttatatcataagtatatatagggagctattagtatcttctatacctaatcctatagctagataggtaacttcttatagttcctctactctttagtagatagcttctttaagcttatatataaaccttacctagtgctatttattatatatagaggtttatatatagtctagcctcctacttagtatatcggctaggtttgtagagctagttctaaatataatagtgaagttaaaacttactatatacttagcctatcttacttatctgtaaggtagctccttcgttattataaagttcgttaagtttatataatctatcttaactaagacctagtatatatttcctttaaggaaatgtctctattcttagaaagcttctataattactagtatctcttggtttcctactctatagtaggtttcttccagccttatcttatataagaagaatataattggtttctaaataccgctctctttttatagctataagtagattactctaattacttcgcctaatatattagattctactaaggttcttagtagggggtcgaagtatataaggagaggggctttttaaaaaatctccttaatctcttagaaagccttctttatagctttattaaagtagaagcctagcttctttttattcttccctttcttctatatatctaggccctagactaatatattgagcggccctataatctttaagtataatttaataaacctatagtaaaagtttgcgaaacctataaattactatatatcgaagatatactctagttccggctaagtagtaatcgcttctacttagataaggtctatagagatactattgctaaagataataaatctaaggaactctacctaagaagtatagaaggtatacttcgaggcctttatatagagtttaaactagtagagccgttctaatactatttatatatattctacgtaggattccttatcctaagagaagattaggatattatctaggtagactactaagaagatatctagtaatcctataagagccttatttatataagcttagaaggttataggtatatttgtaagcctaaacggtattatataatactcgaaatatctatagtaggttctaaataccgttttttatttattacccttcttaatatagatcctatagtatatatctctaaggtctagcttagtatagacctttatactagtgagtctcgatagggattcgctaattaaaggtagggggtagcggttcttaatagtaattatatttaatctatagaagtctatatatagccgaagtttactatctttctttagtataaaaagaataggtacccctatagggctctttgaatattagatctagcccctcttaaggttcttgttaatataggtatatatagacatcggcaaagcccagcatgggcccaagatttcggcccacggcccaacccatatgggctatgggcctagctcccctaggcctagcccagcccatagcccagtaggctaagcccataagcccactagtagcccatttaggcctatttttatataaataataggtcttagtgtatataaaaatgcttacttagtagaatagtatactattacttacatgtgttttagtttcttaattgaaagacagccttttatgtcctagtagccttgaaattttagtttttatttatgaaataatttttaatatggccggtcacttattatttctagaaagaataaaaaaataaggccggtttagtgatactttatagataggctggtctctatatagaaatatatattatagtatagctagtaatgtaggtatactaggtatattatagtgaattataatacctatgcgaccgaatcctttgacctaaatactgattctagaaagaataaaaaaataaggctggtttagtaatactttatagataggctagtctctatatagaaatatatattatagtatagctagtaatataggtatactaggtatattatagtgaattataatacctatataaccgaatcctttaacctaaatactaattaaagactattaggagaattaagagatatctaatcctataatataatttaaaaatagtacctaaaagaagaggggggccttataaggctaagaaggtatcttaatcctattaagtatataccttttaaaattaaacttcttttatttttttctattcttaatagtatatattttagatttagagtatattctttactctataaagctacctactaattttaaagggctaatatatatttctttatatatcctattctatagttagctatagtatatagtctaatctatatactaaatatagttattttaggataaaagggtatataggcgctgctatagagaatataaattatatttaaaattctttaggctacagcctacttataatcaattctagaaaatataaactaatacagagactagtatataggctaatacagagactagtatataggctaatatagagactagtatatagactctattatcgatagaggaggtactctatatactacggcagagggagggggctgaggcctataggctagtagttaaggttcttaagagcctggttaagaggaaagagttaactaagtattagatttatatatttctagattatatcactgagtaggagctatagaaaggataggaagactacgctaatttttaataacagtagattagtgtaattaaggttcagcagtatattcaaaagaattaggagtatatcgataaagtacactaaaaggcgactgcgctatagggtatacgagacactaaggccttctttagatacattatattaaagtcaacagctaagctagctagcaaattgatcacagtaaaaatgaactaccaggatataaggcttactattaataacgaggttacctaacgcgtttcttcctctaggagtagggtccagaagaattgtaagtatattaagctgatcgatatatagtaggcctattctaggctatacagtaagtcgataatcctactctgtataaaggatctccgagattatggtctttagcttaatactaataggttctgttatacagctaggagtagaagggatcttaaagaggttagcgatatatcgatcggtaggggtagtagctagtagccagttctactactaccgctaagtaccctaagattcgatataagtaaggcttaataaagagaaggagggggtaggtaggataggcccctagctattctactaagtaataatactatagctatcctactaagtaataatactgtggcagtagtaacgataagccagcctactaataggacatatagctaccgcgtagcagagataataatagataagtatacaataattgcgaaagatagtatatagaaagagagggaggccctagttacctttataaaaattgtgaaactagtcgaaagaaggttcggtaccagttacatctatttcaaatacactaaagggattatcgatatactaggtatacgaagcggtggtaagagcccttaggagctagtagagcgaatctaactcagttactacaatcttagtcaataggataagtttcggaagaagttctctatctagtttatactaggcgcagatcccagaaacctaaaggaaatacatagtgtctactaattcaatccgaaacccatacccccggtagtcgtatcatttaatactatatactagcttttatttaagagtatttatagaagggttatacctagataccaatttcagcctaatattatctatacctaaataactatagatagcagtatagtactactatagctacttaggtagctaaaagaggactttaatagtgcctaccctagtggaattctatcactaatctactaagaattcgatatatataagcactatttcagtgagcgttatgggcgccgccttagctagctacggagtatatagtatagcctagtatagtaactaatctaataagacctagtgtactatacctattatatattctttcggctggactactaatagaaattaattgtatttctatactatataaagagtacgctacctagtaagagaatatcattctaatatattgatattaatattagggagtttatcgctactagtaagggcagtaatatcctatagggattagtctcccttaataacgaagataacggtaattatactattattctactaggaatataatactacattgcttcttagtagaacaatctacaaacctatatagaggacccagaaaacctatctagccgaaagccatttaaggtccctaatagctttatctataggattaccctaaagatatggtaactagaggatgtggcttagtaccgaataaactggaaaaagtaagtctataaggtaggtaacgtctacctatcccttcctacccttccttacagcttaataggactagtaactagatagaggaagactgtcttactatagtttataggtattagggataattacttaatactcgatatacctaagtctgggtcctaggaggaggtattagctgtatatagagaccttcttaacgctactaggataccctctagactaataagtcggtaatatatatatatcctatatacctttcccgctactacctacttctatactacctctactattttagaatgcctagtagggcggtctaagtagataatactagctgctataaaggaccttaatatactctttaggcctaataaggccgctgcagtaatatatatttagaattagaggcgagaggcatagctagagtacactcgcctatttaagttgaccgttaaggctgaaaaggatgcctataggaaggacttattcttttagagacataagaggcgccttcttaatagtagtgataccagcagtggtaatactaatagtagtaatactaatagtagtaatactactaatagcggtaatactactgatagcggtaatactgctaatagcggtaatactaatagtggtgatactgatggcggtgatactgatagtagtaatagtgatagtagcgataattggcctaacgacaacgtcggcgtcgatattaagataggcgaaggggagggggagggcagtaaggctgatagagaatttaaggaggttaataattgaggctgtattagcaaatttcaatgggtactagatatatcttttttttatagataaatacaactataataatttcttttataataatacttctaccttgccgctactactcccagtttnnnnnnnnnnnnnnnnnnnnnnnnnnnnnnnnnnnnnnnnnnnnnnnnnnnnnnnnnnnnnnnnnnnnnnnnnnnnnnnnnnnnnnnnnnnnnnnnnnnnnnnnnnnnnnnnnnnnnnnnnnnnnnnnnnnnnnnnnnnnnnnnnnnnnnnnnnnnnnnnnnnnnnnnnnnnnnnnnnnnnnnnnnnnnnnnnnnnnnnnnnnnnnnnnnnnnnnnnnnnnnnnnnnnnnnnnnnnnnnnnnnnnnnnnnnnnnnnnnnnnnnnnnnnnnnnnnnnnnnnnnnnnnnnnnnnnnnnnnnnnnnnnnnnnnnnnnnnnnnnnnnnnnnnnnnnnnnnnnnnnnnnnnnnnnnnnnnnnnnnnnnnnnnnnnnnnnnnnnnnnnnnnnnnnnnnnnnnnnnnnnnnnnnnnnnnnnnnnnnnnnnnnnnnnnnnnnnnnnnnnnnnnnnnnnnnnnnnnnnnnnnnnnnnnnnnnnnnnnnnnnnnnnnnnnnnnnnnnnnnnnnnnnnnnnnnnnnnnnnnnnnnnnnnnnnnnnnnnnnnnnnnnnnnnnnnnnnnnnnnnnnnnnnnnnnnnnnnnnnnnnnnnnnnnnnnnnnnnnnnnnnnnnnnnnnnnnnnnnnnnnnnnnnnnnnnnnnnnnnnnnnnnnnnnnnnnnnnnnnnnnnnnnnnnnnnnnnnnnnnnnnnnnnnnnnnnnnnnnnnnnnnnnnnnnnnnnnnnnnnnnnnnnnnnnnnnnnnnnnnnnnnnnnnnnnnnnnnnnnnnnnnnnnnnnnnnnnnnnnnnnnnnnnnnnnnnnnnnnnnnnnnnnnnnnnnnnnnnnnnnnnnnnnnnnnnnnnnnnnnnnnnnnnnnnnnnnnnnnnnnnnnnnnnnnnnnnnnnnnnnnnnnnnnnnnnnaaatttattttttgtttttcggggaaaaaacctcttagcctaaaaagtagtttactttcatacttctgcttcgctactactacttaaagtttttcgcccaaaaaactagttactggttttttaggcgaaaaactcttaacctaaaaagtagtatatatattcttatgatttctattaggcccctagctagtaagacccgcgtagataagtttttttcttagatcgtgggtccctcagcctttttaggattcttagcctatattatgtagcctacgcgtctctatctaaattaggctaagtaaccagctaatagggtaactagttaatcttcaatcttccttatctagttacaatagaattagtcttttattatatatacctatccttcctatttatatatactctatatcgccccccttactgctctatccccttataccgcccccctactttctaccgccatactaggtaccatgtcccaaagtacctaatctaataggaatatagatataacctatagtataggctatatcccctcctctctctagacctcttaggcagagtcctcttatgccctgtcctcctttagcctactacctagtagataagctaggccctttaacactgagcccaatcgccctataatccctagagaccccctatcctgctttacccacgttagccctaaccagagaaaggactacgtcctatatgataaaatagcaaataagatataggttgaatagtagctataaatagactatagatagaaaggtagtatccgctaggatataaatcacagctcccctatatagtaagacttctactaggttacctatagcagagataggataccgaaggtttagtgcaagttctgccacagtattttagaatacccgaactttctgagtaatagaaagggctataacggcttattaactatattaaggtacctaaagacataggcctaccttagggcccaaaacacaataagagtaggaagaggaattagccaattttttctaaaagaagtatatttttaactatctaatccttagctattactaatatatctgggtcgataggaccgtataccccctaaggcctaatattcagaggctgcctaggataaggccctactctgatttattactatagatcgactacccttctcccttattaagagtaagtcctttcggtatctcttctaaatggcctacgtagcactatccctcccctagataccttctactataataatatattagcgcctatgcgattatatttaagagagcgtaagcttagtacttaggacactacctaaggatacaaaaatcttaattatattagactgctagacgtccctatataactagggatttatagtaattaccggctactttatcaatagtagctaggtatatcgcaaggttctacttaggtttaagccactttaccaggtatatactagaaagtatcttagtactatccttcttaaaaccctggctaagtataagattatagaccaggtattcagaatcacaactaataatacttctaataatataatactagttaaagctacctagatagggctcctaagcggtatataggtattccgaataccctaccttacctatattatctagctctctcttaactagctcctagattgcctataggctatactaaaaaataatattattaagttagtttagactgataagaattcaaagaatataaaagaaaatggtaattatcagaaataagcaatctcgaagatactaaaaaagatctataatcttaccctctatatctatattagcctaaagcactaggctaccttcctctaactataagaagggaaggggccgcatattattctaatctaggatatagtaacccggtggaactcaacctttttaatactttactagataaagagaatatacctattctttatatccttctgtactaattataattataaggagatacttcctagtgatttagaatggtattaaattgactaccttctacaaatcacccggcctttctatgactatataacagaactcttaaagataaaggaagtgactacctaccttacctttaagatttataatgccctctttaattacttcgactaggtagaggtactactaaaacagaagtgtgctctgtggaagttagaaatactaagtacacttattattagccacgaaaagctgagtgagtactatatataaacgaccggttgtaaaggagacctctttactattaggataatactggcccctgatagttaactttaattcttctggttggatggctactaggagcctaagtagtatgataaatatcggaaatccttcctagatatattagcgccttatcgagaacgccttactttaggctaggggtcagctaatatactagctataataccagctagctctaggctacgtaagttactaaagagtaggtagaagtctataagaccagctgttaataaggtaacctagtaccttaatagtagtatactataccttagtctcccctactattttactatactatactaactactctctacctttagaccttattaatactaagcctctgcagttctagtaagagaataaaactcgttttcctataattgtataacttacccgcgatatcctcttaatactagtaactagggctagtattaagcgactctttaatactgtataggatatttactattatcgctgcggttgcctaaagtctgagacaattaaggagcttatactataccgctatataactaagttcagtattaaggatactaagataaaggaattgtagcagttacttagtctagtagaggctgaggttaagaataaggagagtactgactttctagaggatagtaagtgtaatctaattagtgataataaggaggaggagggaggggaaggcgatagggcgtaggaggcatctccttcctccttaaccagtagggataggggcagtaatagcgatagtgagatagagggggtttagctagatttgccagagcctactactctatttcgtgtatcttagaggaagcgtaagagtagggtcgacgatgattatatatattattagaatatattaatggtactgtcttcttaatttttactcccttctttgaattttcctggtattccggctgtaactaggatacataataatacgggtcggaaatatattagttatgtatccatgcgctagaggcctatttgtattatataaggcctatatgggcccctattatgggctataggcctaggatatcagcctataatttagtgtaggccgaagaagtcagcctaaagcccagcctattggtaggctgggctgggctgggctatgggccgggtaggctttgccgatgtctaggtatataggacttctaactctatgttcgatagtaagtatagtgacctaaacgggggtacctttcctagctctaggtcgatagtataattgtatataatatattctagtaggattgaagctagagccttattaaagatatctacaaagtctctatatacttgcggtaaagggttgtctatctatatagctcctaaccgttcgccttcttctaatagatctagtggtctaatataaagtatataaaagatactatatagatacagttctttcttaaactcttctggggagactatctctatttctagcggggtacccttatagtataactaacggctagcgctctagtcgatatctagatttactatatagagctagtctatccctaggactatattatatcccgatatatcgatagccttatagtatatctttataatactatatcttctagtactatctataagctagagagcaatctcttagctactatataagtagattttatgcctatcaattgcctttactagatagggtatcccttttatatcttctagattctccttcgcctatctttagctaataaaggtctaggtagccttactattaattagaattctagtaacccctatcggggcgcccttataaatatctaagataaatatattatatactaatatactttagcccttctgctaaccctccttaagggttattcctagtaccgctatagcctatagtatagggttatctatttttttagctcctttaagttattcttctagaactacttagcttttaggtaaaccctcgcgatatatctagcttccttatataagtaatataagtcccttacctagttatctaattttaccccctagcctcgcttcctcttattagaggataatgactagccttatttcctcttattagaggataataactactccttttagctatcctataaggtagatagttcctagccttagtctaataacttcttactattatcctttaagtctatattcctattctacctatataggtatcgcttaacctatagctttatagtatataaaggtatttagctctctataaagctaagataggctacctaattattatagatctttattttaggtaggtcctactattaggcttcggtttagatctctcttaaaatacctatctctaggcagtcgatatatacctaatctaatagtatagagtgtaagtggttatagatccctattaggtattaggtatattaatatatactctattccagcttctatatagcttactattaatcggcttttactttatactataactatactaggtctataacttaggttaaggcctaagtttcgaatatatcctatataatctactttataggattattctttcggtattatatctaaccctaggtaaccttattcgagaggaattccgttacctgtataacccttactttatctaaggcgaactatcgtaggtatctcgcctaaaatacttcttattttaccttaaatatatcctacttatctatagttttactatagaatactggtatattagataggcttcgcggctccctaacttaggagattttactgctttatactatacctacattattatcgcggtcccctactaccgttaggggaggttagggtatcgccggtatccttaatatagggtttaggggttctggtacctaggcaatatctcccttaagtagtggtaggcgtagtatactcgattcctcctctaaggtaatggccgcgaggttccggtcgcgaaggtatagtaagagttcggctttctagtcagtaattataagccgttttttaagggccttaaggtctcgctattcggctataagccttctttcgttttctccgatatcctcgtcggaggattctatcggttaggcggccccctcttctacaggagcggctctttcagtaggtatggcccctatctcagtaggggtttgtaaatcctgcgtttagttttcttggccggtaggtaggggtatgtctccctgtaatacccggcttctactataggtatttcgaggtatcttataggttccagcggtccaattcgtgaaataaagcgattagaatattaggactagctaccagcgtatcctgaaaatagaggttcgaattagagtggaggtccccagcgtgggtcatataattcagtagactaatcgctaaggttctaaatctcatgtgcgcggtgtgtgtatacccctggcgcttacttagcaagtacgtcggcctatacgggccagttgtgcaagtgaccctcggggtcgtaacatttaccttgtgaggccatcatggttcgggcaggtgcgattatggcaagaaagaccttgatgtctgcggtcatgttgagtgcagggaactgcgaacccgcgatgtatctgaagttggataaacagagacacctttttttctagatatatttctacatgtttatatctcaagattcgccaatttggcccagaactaaaatgtatgactcaagtgaaataaatggtcagatttctgttcatcaaaacccagaccatctgatctgcaccgcagagactccaattctgcattgctcgaggccaatttggcatatcatgcagcatatagcacagatgagagcctgcctattcaaagacacaagcaaatcgaaaggaccatatccggagcaattcatgttctttgggagtctcccctgacagcttccattcgcgccaatatgccacacaatgatataccgggctttgacagaactgatagttgctgcgaagacaggcggtctcgagatgtttgataccctacatgctgctggagcagatgagtctaatggtgcagaaatcatcgttgggtgatgagcaggtccaaattcaatgagcggactactcagtatccgctctctctacctctttgcctgttcatggagccatcgaggctggcaatcaacctatgatacagtatccccgaactatcctcctcacacggctacaacctttagtcgcctaccgctatcgtatgccatcgcccgttacgattcaaccaatgctagcgtgtaacggtatctagtagatttaccatcttaccgtcagcttaaccctaatctgcgcacgccatcttctatatatacatcataatctagatcttctttcctggctggtaactttcatcccggtagggttggtggtgcaggaacaacggctctaggatataaactaccttgcgttgcttcgctgcctctcactggcaatcaaattgtagcttacgatccagttattgcaaatagtatatactacccttgaatctagatggcttccccgtggaatgccaagtccgctaaatatacaaaactagagggtaagggcctaagaaaactgtagtcactgacggaatcccagcaacagacgcaaaatgcgactatttggcttttattgcaatggtgagtaatgataccagagcaaatgatatagacggtaatactgctttgaattatggctaggactggtaacgtcagtgagtattgggatggctcgacaaatagattgagcgaggaagcctggcagaatgcgacaaactgctatgggtagtatagaaaagccaggtttcacagcaaatcaggtgagctttatatcctaggcagtagcacccaattaggaaatactctccgcgataagtccttatcgctttccaaggttctccttaggcactaaactacaaacagaaatgacgtttctgccactcccggccgcccggggaaacgagaatctcaggtgtcaagtccagattgagagcgtcatccactcaatctactttattccgcgagtccctatatgatttgaccctcccagaaacccctcaattcaaatcctagacattgaaaaacacccccattccaatatccctccagcctcgagctccgggacgcaatggcacccccgcgccagcgcaccacagctatcgtggatgactcgaggtccgaagcctcgagtggtacgagagaataccacaaagccaccaaatcccgcaggccagctgcggcaaaagagaaagcctcggtcaccagcgcgcccatcgtggaacaccagaacaccgaagaacagccccgagtatgtttcattctgaaagcaacgatcaatcgcaactctacacaaagcacagcgaagagaccataacctaatcccccttttacctctacagctcccctggacagatctacccctcgaaatgctccactcctaccgccacgtccataaactccccacaccctccgccttttcgagcgactactcccgcatgatcctctcgcaaggcgtcggccttcgctccccaaccaccctcgctgcccgccgcgctcaatccttatcccaaaaccactcccaccgaaccaacacctcgtcggactccgtctccgactccacgctgcgccgcaccgccggccaggaccgcgtgagcaaagaccagttcgcgcttgttgtcaggaagcacttcaacagcgctggtctctcggagcaggaaacgattgcgcggtttctgtacactgtgcgtgaggacaggagagggaggcagttccgattgcggtttcagccgtaaggtgaggagtctagctttggtctcttgctcttctcgtttctttcccctttctcgcaggggaaatgggattatacagggctttggacagagctagggctcttctgcttcttatcccaccgttctggtgctagcctgtcctggttgatggtgcgcttggttcggtgcggtgaacatacatggcgtgtgtggcttattgggctgccttgctttgagaatctggcggccttttctcttttgatatattaagatacccattggcgttccgtgtgtttatcttgttctatctctacttcttggtttgcgggttgcggactattccttccactatgtaactatactttacttgacttatacttttgcctataggaattctacgtcattaaatcggcgcagaaaatactactcgaggaagagtagcgacagcttcaagcgttaaatgacttactagtaagcgatagcgagatccttccacagctctgcaataaacaagtatcagtaatatgggaccgcaaacgagcagtttagcctctttgtaacggtgttgtttcagccttggaagcgagcgatctttaagcctactctatcgataagcctgagccttgattgagtctccagatggtatgagtaggaataatgatatttgatcttctgctagctatttgcgctatctcctaaggattagctagcgttagagaaggcctatactgctggtgagcattcgttgaatttggtgacgggggccaacggtgcacggctgttgacacatccaacgtattcgataacttcgcatatgactatgtattcccctagttagtctgattcgtacatctacttcgatatcgatctgtgaggggttcgtcatataaacataggcagatggatttccttatagtttgggagccccctcgagactggcaagaattagtcttagcatatcatcaatacattgtgttccttccacaaagtcctctgtatcttacccggttgacaggccttacacctgcataacgtatacctttacaatagagtgctataaagaagatatagctagttacttcgagggatagttcgcttactaagagagacctaaaaacgatataactaactaaagggattttcgtaattgagacagaggcacttgtccgatatctatactatcaatattttagcttaatgtcatgaaatctttattccttcgcgatagctccgccaaggcgtagtatgctttatttaggtcggcttataaggccatatattaccgatagctatagaactactagataagactaggagtcttattgaaggcttctagagttataggggaggttgcattataggagcgccagagtccgcctacgccacagaaggtaggtaagcctgacgctgctaagattccagctctaagcagagtaacgatacgtttgcagcctcctaaatattccgtaaatgattgaaggtcagcggccggtataatgctcttttcggataaagccatggtcttcaagtcataatatggacgttgaagagctgagcttatcaagggcgaagatgaaagtagggatacggggaatttataacttactgaatgaggcctgatctgtaagacatcgaaaatatgtcggctcaaccgtttctgtacaacataggtccaatcaatggagtactggctcagctagcaatttatagagcctgattacatgaattaaaataaacaatagttacacattattaggattaatagatcctccggtatgctgtgcattttacagtcgcgaaaccgtattaaatggtcggtgtattgaaaatggagtgccaagattgacctataccaattaggttagactgctgtgccaacggtcattgcagtcattacccagtcattacccatcgactcgactataccgttgcccgcaaaatggcatctgctcgcagcctcgatcagccgccgtccaccgcgactgaatgtccagcgaatgtccagcgaatgctacatcgacactgtcaccctgcccgtctgcatctaccccgcccaccgagatgtcgaccccgcgtgacgaaatgcccgaagtcaacgacgatattttgggaggactggaagacgtggtcgttctagattttaaggggcctcggtccctaaagaaacaaatcgactcccgactgaaggaactgcaggctagtagctcctgccagcagttcatcgtgtgccggaacgttgggaaggagcaattgactagcatagatcagcaacaaagcctcggtagaggcattcgaaagtcctataattcaaacttgcaaattctcgtgctcaagatactgactacaattcacgaagccgctcacttgaccctatggcagattatttggaggcagcttatcgcgatgggggatggagagttgatggcaccatgcgggggggggaccttcctaagccaaagcaaaatatcgtctaaggaagccgatacagcgtataaaccagtgaagcgaaaccaggggtctgactggcctactatcgtcctcgagtgtggatactccgagtcgatgcgtcgcctcgcattcgacgcacggtggtggctggtcaacgccggcggcgacgtgaagacagtcctcctcatctcaataaatggggagagacaggccctccacttcgaaagatggtgccttgctccgccttacgaccggcccgtaacccgcaacaccccgagtatggtcccgacgaagacgggcgaggtagatattgttgcaggtaatcccaggccatactcacgtactatatctgtagtaccgtactaatcattgcaatcataggtatcgtgacaggggcgccgctatgcctgaagttcgaggaccttgtggagcggccacccggcccaacggagagggacgtcgtcctgactgctgatcagttggccacatgggccaacttcctgtggaccacttatcagtaactaccatctcggtcggctgagcagcagtcaggctagtactaccctagcgtcttatgcctctctcctcgaatctctcgcgcaaaggggtcccagacgttgccaaccagacacgacctagtttcggtctttcttgaagcagttccttgaatttgtaacggtacccagaagctccaatcatttcactaggcgctgaagccattctattaatagtacagcggaacatgttatcttgtattctcagaagtcttgacattaagtctagcagaattgagaggatgttatacttaacaaacataaactaatacgatacgtatagcacctaggagagaaagcaagaaacgatgaatctcaatgataaagcagagcactgtctctgctatatagttcattggtattagcttaatacagacaagaaataaggccccggtactatgtgttttacatttgggcgacagacgttcgttgtttaatttaccatctttacttcaattcaatttctatctcctttatagaagtcttagggcggacgcgccgtgttctccaatttattcgcgcgtataataattgaatttacacacgcttctaccattttagtattatctagcagggtgatctagctaactattgcttcttcttgctcagcatttaatactgaattatgaaggtggcgcgtcgaacgagaaggccgcccatttaaccgggcgataggagatggtaaggaataccaaattcacgcgccaatggcgcgatttttagtttttctctaggattccaggcagtaatagcatttgctaaaagtagcctccaaatctttcaaggttatacgaagaagtcgaatgaactttagggacaatgggtgaagtgagtactccatattttgaggctatgttcctaggtgaagatatatatcggatctgctgatcggccacatacttgctagtatatatttcatttaccatttacataagagcatgcatgtcctctccagtaagcaaagaaggcagaaaagacagggatacaaaccgaaggtgagagcaggacaagcccccgaaatgaaacaattcagacaacatagtaaaaacccatgaaacagcaaagaatcaaccgagggcgacctcaaacaacagtgtaaaagttcataaacgccgagatatatataccaccctgctcgacatgttccatgtagccagtattagcaatctcaatacaggaaagtcaagttatttccaggcgttgagaccagcccacggatcggcggaggagccgggctgcgactgtggctgcgactgcgaaggggtcttgtggtgcccgtacggtctgctctgcgcatagccaccaggaccagaggcgtatgtaggacctgctgtaggaggataggttgtctgctggggacgcggaggaggcggaggcgggatatagccctgggcagccatatagtgcgagggctgagggccagcgccaggagccggcgtgccggagtttgagtagctgccgtacgggaccggggtttgagagaaaaattgccgattcgggggtggggacacgggggtctggtaaggatatgccatggggttgtagccatcggataggggagctgcggcaccttgctggaaatgctgggccgggtaagctcctggaccacctcccatgtactgcccgtagggcgctggagagtgggacacgcctggcaaggtcggagggtagcgaggtgacggctttggggatggaccggtggttccatacgccggtgtttgaaccgccgggggtggtgacttgacttttgagggcggttttgttgaccccgcggagggaggttccgttgataggcgctccatcagctggcggagcttctctcgctcgcggtcttcttgctctgagacaccgctggactgatcgcggttgttgaacgagtcgggattcctgcggagaccgtctgcactgttgcccacacccttttcgcgctcaatctgactgaggagctgcgcaccttctgaccggcggttgttgatgaaagtttcgacattcttgcggagactgtcgacattttcacacatttccttgtaaaaagtccgtgcttgcttgatacccgacgagagcccatggaaggcttcgtagaccttcttgtatcgagctagcacggaattgcgctgtcttgttatagactcccacttcaacttctcggattgaactcttttgtctcgacgaaggtcatcgtatagcttgttgagttcttttatcaaagatgattgtttgtgattcgcctgtacaagtatgttctgatatggcaggaactttggcaattgttttttgaagcattcggtttcttggccgacaatcgacttcaggtttagaatcaagaattccgtgatgtcatctgcgtggatctaaagacagagttagagatttttcgtgaacagacacgctaggatgcttaccgccgctttgagatctgtgagcagttgagacctctctcggtccacgagattgagtttctttagaatcacctccactttagcaatctgctctgcaacagaggcacgaccctcatcatacacatcatctagcagagtaccttccgccggactagtggcaccgtccttgcccttgctatgcttcgaacggactttgatcaatgctcgctggaagaggacatcggcctcatccgtttcgccagcagaccgcatctcatcaaaatcgctgtcatactgccgaaatgtggaagacaactgagaatcacttgcgctggcctcgttgatagtatctcgataagattggacatcccctcgaagcgtggtattgagtcgagagctgggttgctggccccaatctgctccatactttgatcgcatcttctcacacacgctctcttctagatctagctgctttgagcactcatctaattgcgatagcacttctagcttgcgctcctgcaactcgtcgaatgccctgcggaagggactgtgaccagcaagttctgaacaccagcgacggaactcactgtccactgacatgtcctggttcatgccacccttcaagacatcgagagagcctggcaggtcgagggagagcaagctagcggccagctcactcctggcagtctcggccttttcagtctcagctcgaagcaacttgtccttttcttcggagtaaatactggcgatctgagttaccttctcaggcactagttttttgaagatgtctggcccagtgatttccgtaatatcttgtccttggtataattcgctaaccggtatcgccttggcagctgcaacccttgcaactggtgaaagaccagcctcattagggaccggttggtgatagatgaaatcattgtctttgaccatagtggcaagtaaagcttgcacatttgtttgattatgcttgacgaggtccacgaggttcggacccgcctctgccgtcagactggaggtcgctggaggcgacgaggggaatgtctttgcccagcttagagcagtggcggactgcttatcggccatctgtaaacgagcaatagcaattccataagatccgctctcactgtccgcaaccacctgataatatgatgctactgatcccatatgtgctgccttggtctgcacaacaaccgtccagaccttgtcaaacacattcttttccacgaaattttgcattatctccgcagcctgcgagtagaggtacgctgcctgtccagccagcttggccaaaagcccaggcttcctctggtctgccacttgtttctcaaaaaacacctcttgggcttgagctagtgtgacatttatcagtgtcttgatggtgtcctctttcaggtcggttgatggcggatgtaagaagttcttattaatatatgtaaacattccggcggatgcctggaaagagtgataggcggtcttgagaccggtatcgtcggcccggctctggttggcagcatggcaacataggatggcggagatgttaaagataatggatgccttttcgaaggctagggagaattgagaagtagacgcatgagtgaaagcatcgtacctatagaaaaatagtaagcaaaagcggaatatacaccggaaaaatacccctaccatgtgaaagagatcttgatgtggttgtcatcgatggggaatctgaggtccagcagctctaactgactgtagtatcgatacaacagatcacggccgatagcgctgtctttccctacgcccctcatgtcctggcgaagtcggttgagagtcgcgcattcttggttgtatcgctcgggatcctcgccattgctctgtcgaatgtaatccttgaggggctggatccaatcaatctcgttggtctgcttcaacggacatgatagcatcggcgactgagccattgtcggatggttgccaggagcgatatgctcccatccaataatacgaaaaccgggcgagagaaaaaaacgcggggcagggatggtcagaagctccgtgtctgagggggtcggagtcgaggctgtggggtaagggagacggaacggtcagcgcctgatccctagtgcgtcaatgacgtcggccaatcaggtattcttcgatgcaaacaatctagaaggtgacacaataatggcagtattttgggaaagaaaagagtcgcctagagtgttgaagtgttggaatgtcggaggagggagatgtgggatgtgatatccgtggctgtgcctcgatgggcgccaaaccccaaattagccgctcaactacaaatacatagaacgccattgaacaaaacatttgaattttgagtaatatcagataattaatagatgggaatgatcacagtacagtcagaagtagagagcttctaaggcatctatcactcgagaatagtaatacaagtattctgcccctaagacctgggcagaacaggtccccaatatcgccggcgctatgacatgggtgaggtaaatacaaacggatatagagtacatgatgatttacattttcagctcgacttcttcgagctatccttgctgctatcgtcagcatccttcttttctgtgtccttgttggagtctttagagtcagcctgggatggcttggagccatcatcatgcttctccgtgagtcgatgccatacagacttcaggaaaccttcgttcttggcggcatcttcagcactactggaggtagagaaggggctacaagtgtagtcaattagtacaaaagccaatatccacgacgaactgtgcatcttacctatccttgttgaaattcattgtccgcttcgctgtcttatcgttcatctcgtctgcaaggacctccaaaatggtgcgctgattgcccgtcaggtacttaggcatagcaaccttgaattcgaccttgagatcgccattgggagtgaaaccgcgagcacggccattaagtttcttcatgcccattcctgacaaagtgattcggtcaccggtacccgtaccggtggccaccttgaccttcacttgattgtcgagagttgggatagtcacctcgccaccaaggatagcagtggtgaggggaatggaggctgtatatagaatgtcggacccggagcggctgaagcgatggtctggagcaactcgaatggagacgtaaagatcaccgggctgggtgcgagcaccagggggaacagccgttccagttggtggggagtcaccttcaccggtcactcgcagacgcatgccgtcttcgacaccgccggggatgtctatcttgatggtcttgcgctctcggacaacgccatgtccgttgcaggagccgcactctgatccccggggaacagacatacccgaacctccacaagcgtcacaggtggcggcgacttggaagcctccctgcatgagatgaacgcgggtacctgtgccgttgcactgacgacattgggaccgtttggcaccagacttcaatccgtcacctttgcaggttccgcacttggttaacggcgtgatgacaatttcctgagacgtgcccttcgcagcatccatgaacgagatgtttgtttgcacctcaatatcttcgccaaccaaaatttgttcttggaatgggttacgcccaccccggggtccacgccgcgctcctccggtaaaggctccgaaaagatcctcaaagttgatgtcgccagaaaatccgccgccaaagccaccactggctccaccaccaaagccatggaatcctcccgcaccagagaatgggctgccgccagcgtttggattgaacccgccattctgatcgaaagcggctgagccataccggtcatagttctctcgcttctgggcgtcagataacagttcatatgctgtctgggcttcggcaaacttgtctttggcctgggcatccttattggtatccgggtggtacttcttggccaagccgtagtaggccttctttatgtcgccggcggatgctttcttatccacaccgaggaccttgtaagggtcgggaacagccgcaagaggagatgtagtgtggaaggcctgtcgatcaaaaaaaaatatgttattagcaacccgaaccctgacagtccgtagagacgacataccctagccgatatcaccaaagattcttttctcttgcaaacgccctcccggaaactcctagccggagaagcagagaccgtggcatggtaatttcttgtttgcgtagatgagtgaacgctattgccggaagtctgcttagagcactgtcgctgggtccgcagcaggcgcgccgggaaagccgcggccttgggaaatgccgtggatggattcatggatagtaatagccgaacaacggttggacagcagtggtggttgtaagaattaaaggagatggatatttgagggaaaatgattcaagaaaaagaatgacagtttgaactctagagcaccaataacgttcaaaaccaatgtaagcttctctccggatcacagaagcttcgagtccttcggcagagagaagtttctcggaaaaacgtgtcaccggatgatgatgaaagagttgcttaccgaagcaatggggacgggtgctccgactacggaattccagcttccactctccccatttgtatctaatacttattgctgtcctcttggagctgtgtcacgggctgccacggttcttcactacatcctttcttatttccttcattccattgcccggacgttcacttcatactcaaggagcatgctccgcggccagaccctcccctggagagctgtactccatcaaacgccacgacctctcctccgacggccgtttcttgcatcaccgagatataatgcaacattccgatcaacactaatttcggcccgcttcggtgcctctcttccgtcgtcttcccgcgccttctctgcaagctccattcggcgtagagagaaacccccgccagaggaccctaaagaggaatcggaagaaaaggaagaggacgaaaccagtcacgatgataagggaacggaacgggcacctgaaccgcggaagaagggagccgattcagggaagcatgtcccttccgcagatcaggtagctcccgcgcggagaaaagaccggtcatccgataaagagcgcggagtggaagaggaagtcaagaaagaagccaatgcatcagatagcaaggggaactcgaatgacacaccttcgcccatcccaccaagtgatggtccggccgactccaagcctagcggcgcaagcagcggcggtcatggcggcaacgatgatagcgggaagaagggcaagaaggcctccggggaaaaggctttacaaaagccggcagttcccgacgtttacccacaggtgatggcaattcccatcgcgaaacgcccgttgttccccggtttttacaaagcgatcactattcgcgacccaaatgtcgccgctgcgatccaggatatgatgaaacggggtcagccgtatgtcggagcgttcttgttcaaggatgacaacgcggatggtgacgtgattgagaaattggacgacgtttatgacaccggagttttcgctcaaatcaccgccgcataccctcttcgtggagagtcaagcggcgtgacagcggttctttatccccaccggcgtatcaagatctcgtcgctacttccccccggagagcataccaaggccgctacacctccacccgcacctacgtcagaagacaagacgaccgaaaagcgaggtgatgtcgtggccagcttcgaagaaggcgcacccgagccaactcccaaagaccattacgaacctacatccttcctgaaaaaataccctgtcagccttgtcaacgtggaaaacttgaccgaagagccgttcgacaagaaaaatccaattatccgcgcggtaaccagtgaaattgtcaatgtgtgcaaagagatcgccaccttgaatcctttattccgcgaccaaatctcggcattctacaccgatcaatttccaggaaatctcagcgacgaaccggcgaagttggctgatttcgctgccgctgtatctgccggtgagctccacgagatgcaagaagttcttgagacaatgaatatcgaggagcgtctccccaaggcacttgttgttctaaagaaagaattgatgaacgctcaactgcaatccaagattaccaaagatgtcgaggccaagatccagaagcgccagcgcgagtactggctgatggagcaaatgaagggcatcaagagagaacttggtatcgagtccgacgggaaagacaagcttgtcgagaagttcaaggagaaggccgaaaagcttgccatgcccgaggtcgtcaagaaggtcttcgacgaggagatcaacaagctggcacacctcgagcccgctgcatccgagttcaacgtcactcgtaactacctagactggctaactcaaatcccctggggccagaagagcgtggaaaattttggcgtcaagaacgcagtcagtgttctcgatgaggatcattacgggttgaaggatgtcaaggatcgtattcttgagttcatcgctgtcggcaagcttcgtggaactgtcgaaggcaagattctgtgccttgttggcccacccggtgttggaaagaccagtatcggcaagtccatagctcgcgctctgaacagacaatactaccgattctccgttggtggtttgaccgacgtggcagaaatcaagggccaccgacggacttacgttggtgctctgcctggccgcattatccaagctctcaagaagtgtcaaaccgaaaaccctttaatcttgatcgacgaggttgacaagattgggcgtggtcaccagggcgatccgtcctctgctttgcttgaacttcttgaccccgaacaaaataactcgttcttagaccactacatggatgttcctgtggatctttccaaggtcctcttcgtctgtacagccaacgtgactgacactatccctcggccattgttggatcgtatggaactaatcgaattgtccggctacgtggcagacgagaagatggcaattgctgagaaatacctcgcccccgccgctcgggagctgactggtctgaaggatgtggatgtgaaccttgaacgggatgccatcgaggagctgatcaagtcgtattgccgtgagagcggtgtccgtaacctgaagaagcaaatcgaaaaagtctatcggaaggcagctttcaagattgtccaagacctaggcgaggatgtgctgcccgaagaggcggcacttacagaagcgggcaaggctgcccaggaggagtcaaaggagcatgagccagccgatcctgcgcaagttccggtcgagccggagaagtcgaccacagagatccctcgactggctctcaaggttcccgacactgtgcatctcagcatcggcaagggaaccttgaaggattacgttggacctcctgttttcacatccgaccgcctgtacgaccagttccctcctggtgtcaccatgggtcttgcatggaccagcatgggtggagcggctctgtacgttgaatgtatcctggagaacgcattgaatcacaactcgcgccccgggctcgaaatcaccggcaacctgcaaaacgtgatgaaggagtccacccacattgcgtattcattcgctaagtctgtaatggcgcgacaattccctgagaaccggttcttcgaaaaagccaaggtccacttgcactgccccgaaggcgctgtcccaaaggatggtatgtgaaacttatgttggttaatattgtaataagtcggcggctaaccattccaataggaccctctgccggtatcaccatggctagcgccttgttgtctttggctttgaaccactcccttgagccaaccgttgccatgaccggagagttgactgtaactggtaaggttctgcgcattggaggcttgagagagaagactgtggctgcccgtcgggctggtgccacaaaagtcctcttccccgcggacaacacatctgactggcttgagctacctgaggtgagtcatcaaaatcattccattcttagtggttactttagctgactgtttactctagaacatcaaggagggcattgaaggccacccggtgaactggtactccgaagtgtttgaccttctcttccccactctcgaccaggaggctgcccgtactgtctggcaaaaagcattggccaagcctaagaaggagagccacgaggtcgaggaagagtagcatgctgatacctatttgggtttgggtttcctctttgggtaatgtcgtatatacctgttgtgttttacgttgtataggatttgtgtgatttattgtgtacatggcgtctttgtcttccgacacggaatgcatggccggagttgaaggactgctagtagaccttttcccatgtgagagctgtatggattagagcgagagccaaaaaaagattactccactcaaagcaggaggtgtcctagtaaggtacatgtatagtctatagtgctattgccagcgataatgcaaagataatgcaggcctcacatgcactccgtattatcgagtcatattaatgtatcccgatttagggctgctgtcgtgtcatatagattgacgccaaacaaacagggcgtgaacggagcccccaatcaggcataagggtcaggccgcaacgcattctcgaatttttgatctgtgcgccattcgatgaatcatatctttactcgattttttactccctcacccttgtgtcccttagaagggcttctgattgatctcctgcaaggtccttttgcctccaaacatttcgaagccttgcagcggaagcatctcatcaccgctatcaaacggctgcaggcgattccttaggggagaaaatttagagggaaaaaaaaagaaaaagaaaaccacttatatctaaagaaatttcgtcttgaccgacatattctctcctccttttgcacccgcccttttaccttatgagcttgtactggaccggtctcccagcctcgcccattgcagcccgacgttgtgcgacacttggacgttggacctcgaagtgaaccttccaactcttcgaactaaaaggagactatttggaactggtgggacgaaaatcgtgtcagtgcgacacctaactttcctacctccttgaccctgtctcaattcttatggacatcggagaatcagccagcggggtgttcgagtcgttccttgcacgacagagcggcttgccgtatggccatctctgttcccaactcccgtagcccgacgcggctggctttggacgacaaaggcggaaatccgccaaagcagagcatgtggcaccggttgggattgcgaaaattatggcagggccgcgacgatcatcgagacacgtctgccggggagagtcaagacgagatttccccccgcccttcttctgacaactcgcgtaccaaacaagacaatttaacacgtcgactctcgcgaaaagttggcgtcggtctaccccgagccaccccctttaaacgacaaagctccgatctcgagcgactggctcctcgagaacctgatcatcgccgtgccctctccgccgaccgccgccccttgaccacccagagaagtaggtctccaccgcccaccgtgggccccagactgtccgcgcccgaagttcagtggctcggcccgacgcccacaaccacggtcgatgaccctcccgaaccagaatccgaaacgaacgatacccacgagattgacgatatcccagtaaatacgcatccctattcgggaatggagacggataatttcggggtgccagaggaggaagatgacggctcaatcgatctggagatggagctggaacaacggtggattttgaacctgagcatgcacttccgagatgggacagagcgagagaaattctttgtgacgtacgcggagacaccgaaccgatggcgccgagtaacgatttcctgcgattaccacgatgcaccaccctattcactggagcgggaattgaaggagctgcggtatcaacgcgacaaatgcgcgcgcatctacgaatccattcgcgagtcccttcttgcgatccaattctatgaaggtgtcacgaatctcaggctcgagacgagcgatggccgcttacatgttcatgtgacggaggacgtaaacgaaacaatcccgtacccgcctatctccagtgtgaggcatttggtcaatgcccctatgatccccgaggacttgttgcatttcgaatctcatttatccggctttgtttacaaaataaacctggacggacgtttttttatcaagaaggaaataccgggccccgacactgtggacgagttcctttacgagattaacgctttgcatgcgctaaaagaccgtccaagtgtgatccaggtggaaggaatcgttgtcgatgagtggcgaggtgttgtcaagggcttgctgattagctatgcagaaaatggcgcactggtagacattctgtatgagcaacgcggaaaaacgagctttgcgcgacgcgaacgatgggcaaagcagattgtccagggtctttgtgagatccacgaatcgggctacgtgcagggcgatttcaccctcgcgaacattgtggtggatgcagacgacaacgccaaaatcattgatatcaaccgcaggggatgtccagtgggatgggagccgccggaaatcgccgctaagatcgagagcaaccagcgcatctccatgtatattggcgtcaagacagatctcttccaactgggcatgacgctgtgggcattggcgatggaggaggacgaacctgaacgacaaccgcgacctcttagaatgggcgacgacgcgaagattccagactattaccgacggatagtggacatctgtttaagcccgactccgcgacataggctctctgcgaaagagcttttctcaatgttccccccactgccggaagcacgggtatcaacgcctgttcggtcactggaggacattgccaacgagtccaggcacttgccaatcaggaactgggctcagcctcagccgggaatgatgcagcaagatggccactattactccgaaaaggaattttcggaagattcctacggtaatctgcagcactccatattctctgaaaatcacgacctcctccagcgatcaacaatacctctcgcagaatcgaatggagacatggggttctcatctaagccatcttcttcctctaccttgaatcaccacgaacctcacagtcatgacgagtacatggatttctcccgccaattcaatgatggctcgtcactttacccaccttcttacagtcagaatccagaagctgctccagtttctcagacaaggtcaatggacaatggcttccacaaccagccagtggaactatcggcctttccaaatgagcctgtctatctcgaaagtgcccctatgaataatcagcaagagacactcaatgagccgacctatcgtaggggctctccaattaccgcaccttcactcccgccccccgtcagcacatgtcttgctgaatcgcagaaccagaacgctctcaacccacccagtccaaaggccgccaatgacgagggtaaacttgaagcctcagctttgccaattaaccctactttgcgtgactccagtaaatcaagtggcactcaggacatccttttttcgacaattccgtcttcaattaagcaagcaaagcaagacggtgtggatcggccatgtgcgaagttcgccaatgaccaggatgaccttgaatcctcatctttgcccctcagccctaacttccgtgactctgagggttttattagccttcgatttgggaaagcttctcctatcgactcaccaaaggagaagaatgcggacttaccatgcgcaaatgtcgaaaccgaacctaaatcaactgagccattgccctcattaccatctccatctctctcggaactacctatcagccctactttccattcttctaaaacttccctcggcgctttgggcaccacttcatcgctgaactttttgcctgtcgaaccgttaaggcaggataacttcaatcgaccacgtgcagaggctaccacctgtaccaagcctatacccacaacacaatccaactcaacatcttcccagcttcgcccgacatcgtcggccaatcctactctagctcgctctgagccttcacccgagcttccaagcgtccctcaatcagtgaaatcttctcctatcgagccaccgaagcaaacttatacgaattcaccgtgtgcaaacaccggtattaaacccaaacttaccgagccatcgccctccacatcaagtctggcccgttcggaattgcctatcagcccaacattccgttcttccgtgactcccattaacactccaagttccccttcatcacagggcccttctcctactgagccaccaaagccggagatgctctatgaaaacgatatcacacccacattaccgtcaacaccacctcgacttccctcaatgcacatttcccacctccgccacaccggggcttccattggccctctaccattcgctacaagtccatctgtcgttggaattggactgctaagacggccatgggaaaacccatctgcaaataatccagatgtcaagtccacctcgacaatgccattagggtcagtctcatccctcaaccctcagacttcaaagaagcaagagagcgccaaaaaatactccaaccccatcgaaccgcaggagaatgaacattcactgaactccaactcaaatctgctgggttcgagattgccaatcagtcctgcccacccaaattcaacgcctagttcgacttatcttggggttcatggctcaccttcaagtcaggccaaaccgggcattttgagccaggcacgtttttcctcgaatcgaatatagtcgcaaatacatccccccgcacaaacaacttcgccctgataggcaagttcacacctcgaaccaacgcaagatcactaatatttttacaaaacaatcttgctacattggccgacgacgccacgacccatttctccgaacgagccccatattcggggccgagcactcgatacccttttgatttgctctgcttgtacagtttatgcctcgtcgtttgcctcgtgttattcagcttttggaagcattataccgatggcgggcgaacctggagtcctaaaaagtcctttgtttttttcttctttgcattttggcggattttaattggtttttgctagggtaacagcttttcttttgttttcccctgtctcttttgtgctctctttaatttccttgttgtctattctatggtttgtcggaggccctcgttctgcgttctggtgttctcacccgggaagtcgatgtatattgatgggatttttttatacctcttcttgtctgacagggctgtattatttctttttttcgttatttggcaatgcaattgttggctaggactgactttcgcattctaaccgtaaataggccctgctatctccttccatggagcaatgatttctttatgcttgatcatagacaatgaactctcctcatttggcaaccaaacaagattcaaaactctcccgccaaggctctgcacttggccctagtcctcgtccaatcagcacaattttgcactgaagtggtttagacttatcctcggtatctataggctccgcatctcgaatctcgaatacatcccgcacggcttggatgattctgcttttcccattatccaggatcagtataccttttaaccgatgaacctcaaagtctacggggtgtggttcggatgagactgatttcgcaggcgcagggaacgttgtatcccacaagacagagcgcagccaggcatccacacagtttaccttatctgccgggatcggaggagtaacgatcgcaatagtagaaattgcctggttatagttagaatcatgagagcattccctgtttgcaacaagcaggaaacagaagaggatataaacataccgggtccatatggctatgtcccttcttactgaagtccaaatccgccaggtgatcataagcatgcaaatccaacacaacgccctcaatctgcggcgtccgactatgatctgtcacatgaatcttagccacgctgttaatagaggcaacacgatctcgcacagcctccagctcctcgtctgtgacgagatccgttttgttgaggatcaccacatccgcatgtgagatctgcatatgcgccattgacagaacagggccagaaccgtggtcgtggtgcacgtcatgcgactcggccttctcttcaggcgccggctcatccagcaagcgcatgatgttctttgcgtcgacaagagtgacaattccatcgaggtagatagagctgcctagtccttcgtccatccagaagattggggcgatgttgcccgggtcggcaagaccagtggtctctagaaggatgtaatcgaaggtgccgcggcgttccatcaatgactcgatagccattacgcctgagtctttcacggagcagcagatgcagccatttccaacttccatccactcggtcacttcttggccgccctggtttactgtcattggtttttcaatatccattgctttgtgataatgttagaatgtaagtttttagtcctctggttggacaccttacagtcaccaaattctggaaattcattagcgacgtgtatcatatctcacaacccggtgtaatagacgaaccgttcatgatcaccgcaattttcttgccgtgtttctctgtcaggatataattcaagagagtcgttttccccgctcccaggtagcctaatcggcgtattagtctcgttttattacttaaatcaatatgcactctattcaatcataccagtaatcagggtgatgggcacgcgagctgttggttcttcatctaccgatgtttggtctgctggcgttgcagacacatcgataagctccggaggagcatcctcatcttcaaaattggcagacataatgtgctagtctttgaatgttgcgtaaatacgtagaagaacagagtctgaagaaacctcgtagatgcggcggatgacgttgtttcccaaagtagacgttagggtacagggctcgggcggtcagcggttgttatgttgatggttatctttagcgtctatgcttgctctccatactcgacctttgatctcattaacacagtttgacagggcgtctagagaccattcactctttttctgtttctcggtttctctcatttcatctagcgccctcgttttactgtcgtcatgactgctgcgggagtctccccgtcaagctccccgcggcttcccagtcctcctccatttactgaggttcagtttgggcctcagtcgccatcggttggcgactcctttgccaaagatacagacctgcttggcgtcgcgatgggacaaaatgatggctcgacgcgcagaatccggccagggaccaaatccgccaacatggcatctggtccaccagtggttcccctttcacaggttagttgctctccactggctattttggacattactgataaatacagcttgattctccattccagctccaggaacacctcaaagcccagttcaataagcttgcgccccagtacactaaactcaaggagaagtacgatgtgcttatggagaagcacgaggtgcttatgaaggagtacactgagcagaagctgaaagcatctgacgaggcggacccgaactacgatgtgcttatgaaggaatacaatgtgcttctgggggaatacaataagcagaaccccaaaggatttgacaagatggacctgacgagcgaggttgcggaagagccgacagaaccctcgggaatcgagaaggcgaaagagccgtcaagaccggggagcgaggtagcgaatgagctgacaaaacccccgaagggattcgaggagacggtctggaaatacgaactgtgccgcttcttcactatagaagccaaccgcctgatcgagggctttttctctgaaagcccgccctgctcgtcgcaaacttgtcccgagatgcgagtcaacgattggcagtacatttgcgcgggcgcaggacacccggaagccaaatactgctgcgcgattgactattgctgccatactctggactgggccatgaacattctcacctcggagaagattttccctagccgacttagattgtcaggcgatcagaacaccagaaaccgcttgcatgatatcttccgccgcctttaccgtttctttgcgcacgcatggtaccggcatcctgctgtgttttcgaaggtagataatcatggtggtttgtacgtctttttcaagaccgtttgtgtttactacaaccttgtctcggattacaccatcccccttaaggccggaggacctgatgaagccgcagcagcccagaaaagggaagcggccaagaaaaggagggaggaggtcgagggaaaagaaaccaaggaaaaacctgccaacagcaacaaccgtttcaccattctacgcaaggaaagtgataacacattcggtattgctgtggagagtcaagacccggcgctcctcactggcgcgaccacccgtcgccataagcacagtccctccacaggatcgcgtgttacaactatcgcagaggatgcggaggatctggaagagattacgtcatcgtcattgcatgagcccctgaagcaatcgcttgaaccgcggcctgtttctgttttggaaatacggaccccaggggaacgtaccgtcgcggatgagccaattgtcgatgtggaagaatcctctgaagagctagttgaggaacctcaggaacagccaccgcaagaaatccatgagcagccatctgaaactgccgaagaacaggagaatagtgagcaggttgagcagaccgagcagaccgagcagactgaggagtcttcctccgaagagccggccacaaacacagaatcggctatcaacaagcatgctacggaaggcgatgaaaatacaacttcccacgaagaggagactccagctgaagagctcaaagaggcggtcgaggcggtagaagagccttatgttgcccccgaaaccaaacacgagccagagaaggaggaggagtcgtgatatcaaaaccctctcgaacctttcatgccaatgttacacgactgtttgtatgtattcttacccttgatcagcgatgagtcgcaattctttacctaccagatacttttttgtaatatagttcaggatattgtttatgaccaatgtcaatgatacccattttcctgtgctttctatatattcatggataaaacaaggaatgtagtccgcgagtgaaggggacctcggagtcccgaggtgtggtttcgagattgatctgataagcgcttatcaacacatcgtccgacatcaccgaaaagctaccggggataagttgacaaccttcttattcacctcaatatctcatatccaactccaaaatgccagccctcaaagctaccacagcgccaatctactttggctccttcattgtcacaccacaggtaaattgctcatgatccactcaacccccagtcttctcaaccaacaccaaccacgttatatcacagaactagccatagacacaagtacaaccataaccatgaacacaactaacgccaacacaccaacaggtcttctacacaacgtccctaaccttcgccctggtaaacctgaaaccaatcctcccaggccacgtcctagtctcaccacgccgcgtcgtcccccgcgtcacagatctcaccccagacgaaacaagcgacctcttcctaacagtccgacgcgtgggtcggatggtcgagcgcgtatacggtgccacaagcttgaacatcgccattcaggacggcgcagacgccggccagagcgtgccgcatgtccatgcgcatataatcccgcgcaagtcggcggatttagatcatgccggtggcatggatgcgatttatgacttgctagatgggcaggagggggatttggggaacgcgtttaagaatgctgctcctacggaagagggtgaccagtctgcgaattcggggaggagatctaggctcccggttgtggataatgagtcgcgcaagcctcgcagtgaagatgaaatgaaggctgaggctgatattttggcgagggaaatggagaatgagcctcttgattaattgggtctatgtcttggatatgaaggtccgaggcaattgtgtatatttgaggttattccctctaccgaagcttcaattgctcgcggacatagaagttccaggtagaagctgcggtcttgtggcacggatgaactttggttggatcgactgtattacaaggtcaaataatcaatcgtgttcctccctcattcgtattgaattgaagactggaaaagctgcatagaagttgccgaggcagagctacacgtacttaccagataaccaagtttagtggaatagccctgtagtaaccatgtgctctcgtgattcgtcctctatggtatctaaagtacccggaaaaatgaaatgcaaatgtaaaaatgaagaaacaaacgccaaaaatgcaatgggtctttcaaacaagcccagtgcatgccaactcccccgtcacccattccctgcaataatgcgcaagctgcatgcatatttatgccttcttcggcctttcctgaatgacctccgcagcccaggcctgaatctcgggcaaccgaatgcgcgaggcgacgtgggtgaattcggtgagatcaaccttgtccgaacgctcatactcaaccatttgcaacaggagctccatcttgtcgatgtcatgcacgaagtgggcctcaagagtctcatccttctcgtattcctcaaagatttccttgattttcccgcccgagaaggcgcctccggggaccttgtcgaggagggtagtagcgatgtattccataacggaggcctcgcggcgagccttctcggccttggggatgtggtagtcgactggagtgatatcgccgacaagcgcctcggccatgtcgtggatcaaggccatctttgtgcagtgcgggatgtttatcttggttgccagggacggcggggccatcatggtcatgatcgacatgcgatacatatggtcggagatggactctccattgataccgaagcggcgccagccctcgcgcttggtggtcttgaggcgctcaatcaagtggaagaaggggacgggtgaggtagagttctcttctggacggtaggggagggtagagagcactacggatattagctttgcatagtctgaaaagaggagtttgaggcttaccggtctcggggctccattcaggagcgtcggacgccatggctgatgttattgaagagagagaatgaccgagaggaagaacgcagcacaagtaaagaggacaattgaggaggggaaaaacaatctacaataaaggcgggtctgataggcgctgcaaacagtgcaaaccttccttatctatgtttactctccgccgcctgtttactaaagtccccttccacacaggatggctgcaacaaggcctgttcggccgaaacccctagactggccgggtccctcacatttggatgtgtttattcgcagtctaaagctattgcatctggaccaacgcgaggattggccgggtatatctctccccaccttgagcccgacaccacagaaccaacgaaaccgaatccgactgatagaatgggccttgtatcacctctacgcaatttgggatccagagagcgctcacaatgtacagttactcaatcacaagcctccaattcgtgaacttggctgacatcccctacagaaactccgacccttcttccccccgttagagcctctacagtccgtcaacctccgcgcggctttatttcgatgcctaggcgaattgaaaaagaatggcgatctgggaagggagattgtccttcgcaaaaccatgctggatgattgcaagggcgataaattcgaggagctccttgctagcttctccgcggccgttctccgtaaagttgtggcggtgtccgcaaacgagatggtttggaatcctgcgatgagactttcgaccacgtcagccatgaccccgaccgactaccggactctcctgccgctcattcttgcccaccaagcatctctcggttctgtgggagaacgccatgcccgagttcaagaggcgtatgaccggttctcgaagctgctggatgataaaggggtggagctgaccgaacgtgcggatcaaggctcaggaggtcgtatgaatgatatgcagagtgatcccgagatggtgcgtgagttacaaacaaattggctaggcagcgaggaatgggccgctgcactgctccaaggcggatcacaaagcaccgccgacgcttttctggaactccctttctcggcggcatggatgcaggcaaagaactcgaatgtggacagttacagcagtggcttgaagcaggatctagtccttgatttggaggctcgcgttctggcccaacgaagtcgactgcacaagtggcacgaatataacaagtccctctcaaaggaaagaggtaccgacgaaacgagcacagcctctgctaaagaaccacgtgtgttattccgggatcaccagtctctcacaattgctagtatatccaaagctgttcgtcagcctggggatcgcgggcggacgttgaaagggccggataaatatctcctttcctctgtaaatgaggcgctctcccgcatcaatggaaaatcccgcgtcaagcctgcaggttttacaccagaggttagaaagagcagcaaactacaattcagaagcttgtcggagattgtcagctcgccatcaacagtagcagaagactaccacaccccaggtcattcaccagacttggaaaccacagggctccgttcagagcctgagaccgagcccgagcccaagccacatccagaatcagaatcagaacatattcaacgctcgcccccaaccgtccggctctccccagacctcgcctcgtctgacgaggaaccagctccagaacccatcaagcgctccgataccttggccgagcgcacgcgcagatcaatgtctctcctcccacccgtggcccacgaagcgccacgacgacgacgcagaccccgcccttccttcccagtcaaccagttcatcactccgcgaaaggcttccacgcactcagctcattcaagggatgatatctcgcgtgcttcgacgccgcaggatcggctctttgaggaagatgctgagtacgcaagtgtcttcaagtcccggccgcgtgtggcacttagtcctatctcgtcaccggctgtgcatgtcggcccctcttctgaggaggatagttttgatttggattattatgatgatggggatgagagtgaagattttgagtgggggcatattgattcgcctctagctgctcctcgattgaggcggtaggttgtgaaattagtcaaattatacatatgtacctatacatacctggatcttctctgtggggagggtcatttctattgcgttggacagaaaatatactacacacggatcataaggatgtcttgaataatggacggttcatacgtgaaatgacatggcgatgttgttgacagtgagttgattaatagtagcaagtgactaggtaaggttacacatcacttggtaatagacagtttcaattagttcaagcccagcgttagagtgctattggcttgactccttagatcatgcctccgtatattcacgggtataagattacgtttataaggtttaacatgaagcttatctcgaatcttaatatactactccgtacctaagctatggacatatagatactccgtatatcaattctaataatatttttgagcaaggtagaagataataaagaaagaatgtataactgaaaagtacatttcgatagagtaaactatttgaagtacctcaaatagcggtagagcagtctagaagcccaaaatacttctcaaatatcattggattataatttctacaggctttgtaaaaacaatatcccaacaacaaaaaaagccaaggattttaggtgcaaatgggaaagtggatctgcgacgaggaatcccataggacaagatgtgagacgtaggtaactcgtggcagtcactacgtgtttggccggcatagccctaattggtatagcctgcctaggacccggttatacatgtatattgtccaactagatatgaaaacagtagacggtgaatacagaatgacccgcacgggaagggaaggtcgagtggggagtgtctcccggaagatgaaacactgacgtttgagataaattggggacctcggttttcgagccctatactaatgttaaatccttggaagtacttggcactccttacctatatgcgtacttcaactgtacaatagtatagataaagtgtgattctaaattggaaaaagtacgtcgtactatgaagtagtaattgcatctgagatcctagtaacctgcagcggccataagcaagatcaagctcctagaaacttctccacgttttgccagcgtgacagagggatcaagtctccggaggcccttgctcatagtctggcgatcttactctttgtagtgtgtaaatgctgtaattgccctcgagcattggtctcgagataattgccccgccctcgtgcgctacttaggcccctcaatattttcatgtccgaatgatcatattttgcggatggtgtcctagaaattaagattaaatcagaaacttcccttccgaggttcttcggcgtcaacttctccctcatggcgtctccctccacactggctcactccctaggtcataataccttgggaaagacagatatcgctgtccagtcggtccttttgggtattgtttttgtttttgtcggtctgcggttatggtcgcgacgattccagtcgctgcaattgaatgatttgttgattatagttgcgacggtaaggctatctatttcattgcttattctcagtgattggcaccatggctccccgcaatatctccacaaagctgaccataaacatatagttcttgatggtcggtcgctatgtggtggaaatcatgatggtcgtgctgtgtggaatgggactgcattccacagaggtagcccaggtccgagggtctgaggttttcgtccaatttaatgaagtaagtcacaatgagtggcatctatttgactcttgtcgatgtatgttttttaaactaaccctaccatcagcttacatatgcgggtgatcttctctgggtcacggtgatcgcattggttcagctgtccattctcaactattatgtgcacaacttcagtcagcgagctctgaccgtgttagcatatattatcacggtcctatgttcagctctctgggttgcgagcttctttgcaacagcgtttttctgcaccccgccgaagagaatatggcttgccgacactccgggtcactgcggtgatcgagaaatgttgcataccagtgtcaatgcgagcgaggctgctctcagcttcttggttgtcattcttcctgtttcctggatgtggcgcataccgttatcgaagaccaagaagattgcactgatttgtatccaactgctagggctggggtgagtaatccgtgattgtatctggacgcaacgaatatatatattacagacctcatgactaaccaataccctagaatcatcactattattgccatccgcttgaaaagcgagtttgacctcgacccagaagacacaacgtacagctcagccaggaagtcaatactttcatgcatcgtgcctcctctggggataattgttgcctgcctcccaactctggagccagcaatccaaagcatgttcaggaagccagcgcttccatctacagcccataattctatatatgatccatcctttgcgaggtattggaaggcgacggtcctttcgggtaaggggctggaggaaccagagatgcctctggtcggtcttactcagcccttcatggcaaagatgagctatcttgctcctgggaatatacaggtcacttcacattgggagattcattcgtcgcgaggttcagcaagacttgatagatcacccgtgcggtaggtccgatgggtttgatatcgggatatttggggcttatatagattgaaatgcatagatctagacttcagggctggtacccgaaatgaagtaagttccttttgctatatatttcctcaaagtacagtagatgcatatttaataaaagttggaacggaagtcatactcgacgagatgtatggacctgaaggatgaagatctctatgcatatagatcggtttacgtgcctcctttttcgcccttgaattcttaattacggtatacagcaagcctaggagagaaaatctacttaataaaagacgaaggcgtaaactagtctacatactctcaaattggtaaacatggctatgctttatatgtcccggccgctgagtcttttcataacaactcatcgtggttggccaattggcctagtggtaaggcatccgtttccggtgcgggagatcgtaggttcgaatcctgcattggtcgtcaactttttgctattcttctataggaatacatttttgcgtctttttagttactgcagtcacgggtgaatgctgggttgttagggcttcatgcacattaccgcgcgaatttccctttcccttctagtacttaccccctgccgcttttttctcactgagtataactgagcatggatgccctggtgtattacgtaatcatccgtttcgcgcagtggacatcagctgagcagctaataatccactcaatgcgccctctgtttttctagaatgtctacaggcaggtcagggcggagaggacgaggatttgtcagcttaagtacttatgatttggggtctcaaactatatcagagcaacaagcccatcatccttttgagccttcgagattaagatcactgatatatatgactgacgatggataatgcaatctcgacggacccacctcgtcagccgaagaaagtgacacttgcatgcgaaaaatgccgtgtccttaaggtcaaatgtattcgacccgaggaaggacagccttgtactaagtgggtatcacatccctgaccgtatacttacactctggttaatttgagtagatgtgccagatcaaacgctcaatgcgtattctcagagccgaaacagcgagctcgagcttcacaacgaacgaaaccgtaagtggacgtggagggtactcccctcaagatgtcacttttgctgacaggcgatgaaggagattagccgagctggagtccaagctcaccaatatcattggtcttctatcacaatctggcgcaccccttcatggagtccaaacacccgttgatccagattgtgggctggctgcaattcctgaatattccaacgacaacccacacccaacagctgaatggatgagccaagggtacctggctgatcctgagttgaacgaagccctaggggcgagcgaagagcagaataccaccgaagttgtcccagaaaagtcttgggacgccactgcgatagacgctgcatggatcaccgaattaggactcggtcctgtcgtcctcgagcatcttctagacaagttccgcggcatggcgtcctattttccgtttgtgcagctttcatacgcctggactgctgcatcgatggctgaggaccgccccttcctattacttgcagctgttgctgctgcttcctcacagtactgtcaccttcaagacgccctgatcagacaatttaagcagactctcagtcagcgggtaatcatagctggcgaaaaagatctagatctgctccagggattacttgttcaccttgcctggtaagatttcagtctccatactgccttcgcggcatcggaggcaccggcaagctgaccaatgtcaggtaccatttccactttgttccaggaagtgcacaatactaccagtacttgcaaatcggaatcggtatggtcattgagcttcgccttgatcaagaggctgccgaattgcttgagcaacgaactgagctaggtgatgcttatatccgagaagcatgccgtgcttatctaggctgctattacatgtctagcatgtaagatgccattccccgccagatacacgccaatgagcttgagctgacttggatagaatatcaatgtcttctggaaaacccaataatctccagtttcacgaggccatgcttcgatgcgctatgatcctgcaacaacagccagaattcgacacagacctcttgatatacccagtgacgaaagtgctacagttcgccgaggaagtctgcgagacttaccaatccgaaggcattcatgggactcggctgtacattcatgctgaacgattcacgacgcggttagaggaatggtggtcgtctctatcaacggatcttcgcagcacgggtaggaccatcccaagctctgggcttttgaattagctgattgagaatccctagtgttgctgatcaactgctatcataccgtcaagatccggattcaagaaatgggcttggtatattgctatggacagagaaggccaccgtctccaaaggcacaggaagattccaccatgttatccacacccccaatggtcatcagcaacttggtcaaatgcgtcagctctaccaaggagtatctcgatttgttcttcaccattcccgctgtggagcataacagcttgccaatttccgcatggtatcaagttattttgacgatatttgtgctttacaggttgtctgtgggactgccagaagtacctgaatggaacggggagattgcacaggaaactgtgaatctagaggaataccttgatacactgctgtctaatctacaggctattaaaccatcgccagataggcaaatccccaccaagagcctcttttcaatgatgcatgagatcattgggagtgtgaagaattcctatgcattgacaaaagagaatctcgcacatgttcatgatagtcaccatgcacatcacgaccttgcttcaaaaaacacagccgcatctgctcaagggctgcaccgctgccctgcgttgcggtattcgagtcgccgcatcgctcaagctccggatcagcctacactacaaaacgccattgctacggaagtccagaagataggagatgagaagctgtggggtgatattctattgatggatgcatttcatagcatgacaggttcatcagctacagcgttttgacaagttatccatgctccagacctcaaccctgcaagcccaaaataacatcagatctcgtccggaaagacatgggtggaaatctgatttccggccgaatcgtatcggtggggcagcacattgaaaagtccatcaacatcccgcggttcataatcaagcgacaagcccgcgagagtaagaatttccagcccaaaattctctttgatccagtgggcaaccatatccatgcccgccactgctccactcccagtccagatattgccatcaatgatccacttcttctcctttgtccacttgacattcgggtatttcttcttcagccaattgtactcgacgttattgaccgtagccctcttgccatccagaacgccggtggctgcgacaatcccagcaccagtgcaggtcgtgaacagcagctttccagcggcgacatggcggcgaataaggccctgcagttttggagcaagattgctgttcgtaggactatccccgccgacgatgagaatatccaattccgggacgtcatccgcagtgaccgtaggcatgattgtcacagagcttgtaagcaggtgcaccggctccagggtctctgcgatatggtggaagacgaattcgggtgcctttgctataaggttcggatcgatggggttgaagaaactgatagcctggaggagcgccttactcgcggaattgagtacatcgaatggtccgataacgtcgatcgcctggtaattgaagagcagagcgccgacgtggatgggagccattttggtaggtttatcaaagacaaatgtcaaaagaagttgatttgtttgttgatttgcttgttgatagtcaataaattgtgttggctgtctttgctacttaaatactttagggctgccattttctgggataccataatcgcggagcgggattgctcgaaggctccgccctccgtggtcgacggtcttggcacggacaacgaggtaaactcatggaccgtgtccgtgatttgtggatttgaaatctatattggaagattctagagctttagagtgcgaaattgagtatcgagatgcttagagtaaatgttatgaaggtatatatccaagagttatcgatcttgtctcgttacgacttggtttccctatgtctaggaagttttgatcccagagatgatctgttcatactagcagatctagaccttcaagaaacggttcataaagatttgttagtatgtacaacatacaatgtaggtcctgtaggcggtgatcgtttggaaggaggggtaacggtaatagagcaaccgaacacccttttttcaatcagtcccttcaagtttcctaccatctcctcagtgttaaaagacagcctaacacaaaaatgcatatccctctagagatatgtgaccaagtaaacactctgctcctaaggccttaggttcggtgctaattatctacacagattgcgtattatgtctggctcgatgacggccgtgctctatatctgtgggacgctgcaaagcattactcggtaccttactggaggagtcgaaaagacttagggaatctgcgtcttgtcaacaaagctttctgtcacagtgccgcatcctggttgttccggcacattgatgcgagatacagcgcctgtagaggacccccacatcttgaacgacttatgaaactatcaaaaagcccctacgctgtgtatgttcgtcagattgatttcgggtttcaagagacgggctcggaatctaccgcgtataccgccgcattgtatatcgaagacctctttggatgcctgtcatcttgtttgatcaagttcttcaacctcgcggcgcttgaatttcacgaaccacccctgggcctttcacaagagcagagaagggcctatatggatgcggtttcttcgactttacgttacgtgccgctttcaaatttgagagaactggagttgaaattccccctaacctatgatttcggacgtttcttcccgacccagaccagttcggtgcagatccctatcgaggatgtcacgcaaagtcttcgacatcttggattatattcctgtgaatatacaaatacgcgggaccaaaggtactggttgaaaccagtttcgccagaaaatgctgcactcccgaacaacgtttatgccacccgaatgttacggatgattgaaattgcgccaaatctccaatcgctcgcaatacatagtctcgacgttctggatattgactttctcgcctttccatcctctctctgcctacggtgtcttgatctggggggagtttctatttcatgcaataatcttctctcacttatcaaccaatctatccacagtatacgctatatcaatttctcgcttgttaaattgaattctggaacatggagacaggtcttggtacgaatgtgccagttaccatatcttcttgatatcattatcgatgccagtgggtactcgttgactggaaccagctctgatctagctcttgggctgcttccagaacgagattgtcctcaagatatcgaaaccatagattccttcgatgtgcctgccttaggcaacttacaaagacatgtcaattcgaacaggatcgcttttgggctgcagccattcccagaaactgattatcgacatatcaatggcgcctctttggagtatatgctagatttataccatgtctgatttaagactaaacttcactatcgggtgttttgtcttcgtgtcatttttatctacattcaagattctgattggtgaacttagaacgcgttttattggaactactccattgaggggcgacatttttttaactcagtaatcgtacattctccagtttttactcctttagtcccgatgccagcaacaatcaacgacatagttatatattgtaagccgggatatacatcggtttcctagtaggttgtatgtttcttgatcgtacttcagcaagtctaagtgttgctgttcctataagcattaagttgagggcagcaaccagtgagcctccgagagccaatcattccaaataaaatactacgttggtgacctagcgaagtgagagcaaaacagtactaggataaaagatattgcaccttaagcagtctcagtacctaaaaataacccctgcgtggaatagctttcagctagtggctttgccacctatagagcagactgagataatgaaaatgcatggtcgcgcaggagttgtggagaagcagcgcgccgcagcgtagttcgaaaacccctgtacttgccaatagtttctaagcgcagcatgcatgaatttgactacgtgtatgccttgggcgccagactaaaggttgggcagacaaataaatctctctacaactacatctgttcttcacgcggcatctacgtatggttagcattccgaccagcttcaatgttataaacatggttaaaaaaaattctattcggctttactgtcctgggtgtgagagggggaattttcggagtttggttggtgctagaaatcatttccaaaagaagcgtcactctctccagtgtcctatttgcgaaaaaatctttcaggatgagacggcgattatacaacattaccaaagctattataccaagacagcctcgccgggtagagcaaacgatgttcaccagatatcaccgccaagtgtactatcaagcgcagcggtgacacccgttgtgcggtcgatatctatgcccacagttgtccccgatgagccctcgagactcatcgagcagggaccggaaattccaggtggtcatttgttacatgatttactggcttctatgccagcactaaacatcaacgaaggccctatactaggtaaggaacctcgtatctacccactgagtaatccgaggcttatattcattccaacagaagctctaccatgtgttgcatctagcactgcggcttatccagcatatatggaccttctggagcaggatctcatcttgcgatatctacgttcgaggtgccattcatgcaatcgtcttgagacggaaggatatatcataggtcccacaaccatcagaaacaagaaaagcccacgcaaaggatcaattccaacctatcaatttcgagagacacctagcacggagctacaagctgcgggcactgtttgtgccatcgcccttgactgtgagatggtcggagtgagaaacggtcgccaaacactcgcttttctcagtgcgatcgactttttgaccggcgaagtgcttatcagtcgctatgtgaatccatccgaggaggtgcttgactggagatacaagttcactggcgtgacgcaggccattatgactagcgccgttgcctgtggtgcagcattcggaacctggcgagaggcacgcgataaattgtgggagtttatggacgattcgaccgtgttggttggtcattctctccagtacgatcttgaagtactaggcatatctcatgcaaaagttgttgattctgcgatattgactgctgagactgtctacccttccattccatcaacgaagccattgacccgcaactgggcgttgaaaacacttgcgaaggactttttgggcttgaacatacagactagcgattgcgggcatagtgctttagaagatgcatatgcagcacgagatgtcgtcatctggtgtatcaggaacccggaggatcttaaagtatgggcggaaaaagctcgactccaggaagagaacaagctcacacagagccgacaaaaatatgctaaaagcaagtccaagggcaagtttcctgccacccagtatactccaatttgggaacataatacagtattcgacgatgtccccgaagattttcgatggtgggattccgcggaggagtttgaatggtccaaaggatatgactcttggtctgattgatcctggaattgcgctcatggatttcctgaaatatgcaccatttttagtcattccttccctcctctgccactttactttatgtcgttgattgattttggaaccatttcccgagtgccaggcatcatccggtacatctgtcactatagcgacctatgtgtcgcgaacaatttatagctgtcaagattggccaatcctatctacgtaccatgagtgagcgctactattatttatttctcttatatagttaggaaaagtgaactaagacgagcgaaacctcgagggcggtgctagtgattgacgccttcaccgccaacttcgccgagtccggacctgagacgcgcagctgggaactcccgaatagttacaggcattacaatgattggcattcattcagagtacgtgcaagtcatacctcgctttcatgacctaccatactcttcagccaaaactcgacgaacttcccgatgatccggtccttgggattcttcaatttactttccaccccgaggtcgacgtcttcgacgcatcacagcgcgcatcaacactctggcagaagtctttacgctttgtttcgactatccctggttttcaaagactctattggtcatcagtgaacgatgtctcgccatgtcagcagattatcgtattgatccagtgggaaagcgtctttggctggaaactatttcagtattctcttggcttcagcatgatgttgggatatatctcccaagcctctaatcgttgcgtccaaattgatttgcacatcgaaattcctgactcatgtcacctcgaactgatctccttccagtttccagcagctctatctgcttctcagctagacgagaaatctggtttcgaagccaaatggggaagcgcgttttctagacccgtcaatggaaaagtttctagctctgaattagcttacgcctgtgggcaatggctccaaagagacaaagactcggaggaccagcttttcattggcctgctcttttggaactcaactccacaatttgacggccatctgcagcttcaagagggaggcagtcaagatctcacaaaacatatagcggagcttatcgaagatgcgatgcatatggtctcggcttgcacgggccagctcaatcacgtatcagatgatcctcttccagactccccgcagtgtcaaatcaagcatcaagcttttcaagcagatgtaaaaccagtatacagcgccaaacaagatcgaaatgagtctggtaaagataagtatcatgtggaaagtatgtcacaggcgcgaagaaccccccgggaacgtatagctgctgggcccgctagtgcatggtacatgatggcacacataactcagcatcatctaccccttgaaatcaactgttctgaggcggattgcattcaaatgatttctttccgtgcttagcgtggaaacacaaaggtgcagtgtcaacttgaagcacttcgtgcgaaattatggaaactaggagattgccccccactagcttggggtaaagaaaaagaaagtggaggggacagcgacaaattcttactattccttggtatgcttgccttctctgacatggcaaaatgaattcatatctaggtagcggggttgactccattatcgacaagtattgagaaccactatgtcgtcttcgaaaagccagatccctggatgatcaccgatatggcggaaagaaggagcgcgagaagccaatcgctccacagtcgatttttgatgtcccctgggctacttaaatataccctcacacgattttaacccttcttagacgtcaagaggcaggtcatgtttctctcctcattagagacgcttttgaggtgagaaaaacagtcggtctagtatagtgcacagtcagccgaatgtttaaatatatagtggtctttcaaacatatgcagccgctccgttaatagtcgcacttttatgtccctaaagaaatcaagacgattttagtccggtttgtgcatagtgaaagtgtcctaaaatctaatacctactacatctccgtcactccggattgctaaccgaagatgatcttagactccatgactgagcctactaggttgcgattgatctaatgctaatgacagtctccctgaagtagtgtcagcggaagacaagcgatggtacagtcctattattaatgcctccctcagttgtacttttggtagcttttaggttttctataaaggtatagatagatactcactccgctgagagttttcgttaaatgtacgaatctgccatatgaggatgaacaaaaggccccaaagataataataaaagtcccatcagtcagataatagggagaaaaaaaaagataacgaccaatgcaggattcgaacctacgatctcccgcaccggaaacggatgccttaccactaggccaattggccgccttgtgtagaagataatgagatatatgcataacaaagaagaacacaaaatacatccttataaccaacatacagtgcttatgtagatcgcggtctgtaaataccaaccaaaggttgaggtggagtttacatatatacgggcgctccgaccgatcattaccagtggcagtaaacaaatcgatgagatcccaagcaggaggcaggatgtctcccaggaacaaactacaaccccttaagcagggcgtattgcctaccaccaatcaaccacccggaaagaagctcgcgggattaaatgtccagggcagaagcactagcagtgcaggtcttggatcctacatcgtctcccacgattagccagggtcatcccttgcatagcagggaggtgaacccatgatcgacggggagatttgtcgaaatcaagcatcggtgcattcctgttgaaggagaaaagaatccagccacactgtcagagcggcgaaagaagctacaggattcgccgcgaggggtgttgatattggagcaggccgcgacaacaccccttcatatctcagttctgacagaatgcgaagacgatccgtgctagaacgattatagaaagtctgaaatcccccgaggtgactggcattccctcagacgttcattaatatcccttctttgttttttatttacaaatccagctccgtcgctcgccgacacttcctttctttcaccttgatacttgcgatacaggtctacagccgacacaatggttaagactacttacgccctcacactctttgcggccgtcagcttggcggcccccgttgcgcagcttaccgggcgtgccgaggcgcagggttcggttgagcacaagaatatcattggggatattcctcttcttggacctatgctcgcaggggtatgtgcttttagtcgataaagagtggaagcaaagaaactgacagcaatcgaacagaagcaggatgccaagcgcgatgagcaccataacctgatcgacgagcttccggttattggaaagcttcttggcaacgttagtttacccttctctctcgaatagagatagacaatagagtattaaccgagaccccctaataggacaagcagaaccagcgccgagatatcgggaaagatggtattagtggcctgccaatcatcggagggctgttcggaaaggtatgtatcttcagccagcagtcatttaagggacatgatattgacggaacactagcacacacacactggtggcgagaatggcatgaacaagcgccgaggcgtcgatcagaactatggccagaatgccgggcaaaatgagggcgagaacgcgggccagaacgcaggccagaactcaggtcagaacgctggtcagaatcagggacagaatgctggccaaaaccacgatgaaaacaaaggccagaacgagggccagaacggaggtcaaaatgccggtcagaacggaggaaaaggcttggaggacgaactggaaagcagcctcaggggtattcccatcgtcggaaatctcctcgtgaatgtatgacatgcgttatcaggcattgaagcagtccctagaaccaggaaaagaaagctgacctaacacaggaccaggataaacagaagagcggaacccctgccaagcagctcgatacccgccaggcgggccattccaagggaatcttcggtgtcctgcagtctttgactagcagtggtgtaagttctatcccaggccacacttttgaggtacacaagcgctaatagtccaaatagcccgttaccaagagccacaagcgcgccgaggagttggagcaactggactctgctgcgccgaatgcgaacgagactaagcaaggtgccaagaagacagctgcagaacaggcagcaaagccgagcgagagctccggcggcctcctcggcggattaatgggcaaggatggcctcggtgctctcaagggcaacgctcaccacggccttggccttttgcccgtatgtgccacctactagcagagaaacagctcaccaagctaaccttcgtttagatgcgtcgtgaccaagctcccatcgagggctccacccttgctggtgttcttctcgagggtggtgctttgggaaaagtaactaatttcctttctggtggtgctatgcccaagcctggttccagctccccttctaagatcggtgatggttctgttgcgggtccccctgaccctgcgtctggtgctggtcctcactctggccctggtcttgctggtgagcagaagcaggcctctggtgctgccttctgagtaagctatatgcggcacaattgcgtgtgttttagttcttctcgatcaaattgtgacgaggattttatgaaattagttcgttggactagtcgaccgacattggggatgtgcaatcggtaatgctattcagttgttcagtttttgagttgtcatttattcttccaaacaatgtcaaatgctttccttgattcgatcataaagcgaagcttcagtgtaaaaacacaggcaattttgaagtctgggcatagaaacccgcaggaaaacccaagccctgccacgtaatgagacagacagacgaagctgcaagaagcgcaagcaaaaatcaaagacaaaatcgttaatcgtagccaaatcaaaaccggggtttccggtccggaccacccagttaaagagcgcccttggggggtatcaggtcgttacacgcgatgaaatcaaaaacagccataccactcgagatggaaaaagatgctcggaaaggcgaatcgcagcctaatcagagtcatacatgtccacatcgtctactaccaccgtcgtgcccaacgcctccttcccttcgcggatcatcgcctgcaactgcttattcagtcgctggagactggcatcttcttctcgttccttgcggcgcatcttagcagcctgtcgctgtatatcggcagacacgggggcatccttcaaccgaggggatggcaggcccccctgtcccttagtaggcgagtggggtccgacggaatacgcagtccgtttagtgagccggggcataacagcggatttccgacgaggactcgatgcccgaaaagcgcgtcgtgtgcggagtgacgggctagcaagctcgctgcccgcgaatgcatccgagctcccggggaccaccacccagctcgggtcaacctcgtcgtctggatattgaccgggcactggtgtcgagcaaaacgtgctcgggctgtacatatctttctcggcggatgggctggttgggggcagccagctggattcgagagttgttgctgggctggatgacatgtcgtagccctggcctcctcctgcgtaaaaccctcggaatgcgcccgtccagcatagatcgaggactttgctcacggctttgatcacggtctggccccagcctgtgggtgtggtgctggggctgtcggggcctgcggatatgatgccagagtcacggcggctgcgcttgcgactgccgttgtagtctgctaggtttgctgactcgtcgctggaatcgaatgagggtgggaggaaggattcgcggtatcggtttggacggtaatctagctcagccgaagcgtgcaagtcgttgcctccgcttacgcttactgagcggtagttgggttggatcatcggagacccggtaaaattggactcattatgtgccgaatgtttctctgtgttacgacgtggtcgcttgcgactgaccgagagagaataaagcgacgtggaagccgttgaggctggcactttgaatagctgggagggtgcatttgagaggtcgagtctaggagagttgaagacagcgtgcatgtctggcattttgaatgaaagaagggataaagacaaaatagatccaagatcaaaagatcaaaagatcaaaagatcgaaatcggagaaaaaagaagaatttctgaagaagaaaaaaaaagcgagaggttggatgttggccgtggcggcaattagtgttttccttacaagtcacttctttgtctcgcactatttaaaccccctacatgacctcatatatcagatccatttggaaattacaatcgctggctggtccattgtattccagctgcctccaagccctcatcaccatcaactaacacacaccatccctcgctgccccgtcctccatcgcccgcaatcaccgcctcaaagtgactctgggcgtagtccagcacttcctcatcaaaggtgccaggttgcaaccagactgcagggatcccaaccgagtgcgcttccttcagcaactgaagggtcacaatcgggggagtcacaactgagagagaagtctgcgccggcgatggcaaaccggccggcgacgggactgtatcataagcacgcgaggggaggttgatttgcgctgctcgcggattcagcggtgtcaccggtagagagtgttcatgataccaggccaggactgtaattatttagttctctatccaaatgccaacagagcgtgttgccctactcttgtatccgaacttgtgagtgtcattgctggcccccgccaccgcaaagcggggggaagagaagaatcgcttgactgctgacattgtgctttaatgataatccggtagaaggaattgatttatgttcttgaagagtcagatagttttgttaagttggaaacggtagccaagtaggaaagttgcaggttgcaagttgcaggaaataagtcaagcgattgcaacctcggccgatgacgactatcccttcatctcccatctccgacattcggcgaacttccttatttctcatcttcacattcattcgtacaatttatgccaccatttctcccccgcaagcgcgtatcctccgaggacccgcccccggccaagcgccaggcccggcccgataattctcaagctcctccccaagctccccaagctccccaagctccccaagctccgttccacctctccgattccgactccgactccaactctttgagcgatgcacctgaaggtctcctcaaggaaaatgcctctgcgtccgaagaatccgaagatgaagaagaggatattgactgggaggatgcgatagacacaaagaccagcgtcactagacccgtcgcggccccggagctacaggacctagagttgactctggaccaaaatgagacacatgtgtctgatcttctggagggtaagaaagggcctagtaaaattgagcgccaaatccgaatccagacgcactgtatgcatgtccaatgcttgcttttccacaacgccattcgcaattcctggagcaacgattcgaaagtgcatgagatcctgcgcaaaaagctaccggaagggattcagaaggaagtcaagaaatggcgtatagcgtcgggcctagaacttccagagccgaaacccgaaccgaagagtaaaaagaaaggcaaaaaggccaagaagaataaagactggagtgatgagtccgagcgactggaaccaggccagccggatatgagccgtggtgatccaattatcatattgatgaaggtgctggtcgcatactggaggaaacagtttcgtatcacggcgccaggattgcgaaagtatggatatcggccggtatctgcccttgaaactgcaatcaccgacttccgcgaggaggagcatgacccggagcgtcatggtgagcgtatcgccaacctggatgagttccgcgcgaccgccgagcgtatgcagggctcgcgggacgtcggcgcacagctcttcacggctctcgttcgtgctctaggcattgaggccagactggtggctagtctacaaccgctgggctttggctggaccaaaggagagacctacacacctctcacaccttccaaggcagataaggaccccggggatgaagaggagtcggaaggatccgagcctgagactgacgctgaaaacaaagtaccagcgaagaagcgtaagcaaatcgatgcggatctgccatttcctatctattggaccgaagttgcctcgcccgtcacgaatgagatcatatctgtcgacccgcttgtgctttccaaccccgtggcgccatttgcagatacagatctacaagcaaacttcgaaccacgcggtgcaaaagcagaccgggccaaacaagtcatatgctatgttgtagcccactcgtccgatggtactgctaaagaggtcacaacaagatacctccgacggcggacctggcctggtaaaacaaaaggcttccgaatgcccttggaaaaagtacccgtaggccagcgcgggcactacattgcctttgactggttcgggatggtaatgcgcgggtaccagcgagcccgcaagagcaaaaccgcagtcgacaaactcgaagaaacccgagatttacaacctaaccaacccgaaaagaagaaaacagctcaaacagccgatactctccaaagcctccggacctccaccgagttcgtgctagagcgcttcctccgccgcgaagaagccctccgccccggcgccgagcccgtccgaaccttcatcgctggaaaaggcgtgcgggccaaagaagaacccgtcttccgacgagcagacgtgctaaaatgcctgtccgctgaaagctggcacaaagaaggccgcaagccgagaccgggcgcggtagcgctcaagcgcgtgcccatccgcgccgtgaccctcatacgcaaacgtgaagtcgacgaactgcaccgccagaccggcgagaaacccctacagggtttgtacgcacgcgaccagacagagtacatcatcccgccgcctattcaggacggccgcatccccaagaacgaatatggtaacattgactgtttcgtgccgagtatggtgcccgagggcgcggcccatgtccccttacctggtaccgtgcgagtatgcaagaagcttggaattgactatgcggaggcagtgacggggttcgagtttgggtcaaagatggctgtaccggttattcagggtgttgttgttgcggccgagaacgagggtttacttagggatgcttggaaggttgaagctgaggagaagaggaagagggaggagctgaaggcagagaagaagatcctgcagacgtggaggaagtttctatttgggttacggattatggagcgggtgagagatgagtatggaggtggagatccagatgctgatcgggagcgcgattcgcataatcccttcgctgtggagaagaaaaagcgggaggaggaatcggaagatgatggcgatcaagaaatgcctgacagggagtcgtcatataacgcgattgatcatggtggtggctttcttcttcctggtcatgaagatgccgcagacgatgggttgatcgtcgagcaccatgatcagcagcagagtcctgcaggtccgtctcacaccgattatgacccggatgacaacgagccattcgaatctggacctccttcggagtccccgccggtgtctatctcatcgggttcagataacgaggtggataataatggcgaggaggaagcagaacctgaatacgttcctcgctcgacacgacgaacgcgaggtcgttaatggaatcaatgtatgtacgcaccatccatattgctggggttgggttgtgtttctactccgtacgaactggtcggaatgccttcccatgcaaatagattttgtcacagaattcgaggatactcccaccaaagcaagtctattttacgttggagatctcagatatagtcatacgactacttttccaatgttcattacgactaaatatgccaccagatcataactctcttattggaaactgccttaccgtctctattaccaccttcacgaacgctagttctttcattcgcaagaccatatggcttttacactgtagtagcccgtaattcatcctaccttgaaactagcaaacttttcaagtcgcttggcttggtatacatagcatagaaatcaaataaatcaaattgttaaaaatacggagcgcaacaaaaatagttaactcggggtcaaatattccctactatccaaccatcgtctgatcccagcctagggtcacgttaggaaagagtgcaaagccatacatggatagctcctattcggatatcgcccgatacataattccacaccaattggccaagacgttcttccttccgcctttttggctgagatcaaaccagggcaacgagctcacatataacatatgtgtaggtgtgggaccatcaaaagtctccatatactcataactgatttccaaatggaggaaacacatgtagtgctgtgtcgcatggatgattacaacactgccgaggtcgttagtacatagttcgaatgaataatgttcatagcgaagacattgaggctttcgatgtgtaggaatctcactctttgtcagtgttgctggctctggtcaccagcccttcgcaaaccatctgtgcaaggcttttatcggagataacaggtttctcatttcgaagactctggaattgcgtcttcgcttccaatatcgcgacatgattgtctacaagcataaaacctccgtctgatttttggcgtcgcaaacaaaggccaccatcgtcaatggccactatccgccggcggttagttattgtagtggcggcaacccgtgtcttagcgtctcggaactcgacaatagtggaccttggcgctggatgttgaggggagcgaagtataagatatgtctaatcacacatgacgcaagtcgcagagtgtcatcttctggtgttataccttgatgctgtgcatcaaggtcgagatatcctaaagatgaatcttcggaactgtgtgagctacggctactatgcgtggagccaatctggatttcgccggaattggtgaagtctgactggtctatttctcgtctgacacgcgaggactgccttcttgcaagctcgttctcatttccttcctgggtaatagataggccctgcacgcgccggtcttggttccctttgaattgggccattgctgcccagatttgtccttcagcgattccgttaccagaatttagcaccaagttgtgctcactgccagccagaagtgccaggtcgggtccttccaagaacgatgtaatttcattcgggaaaggcggcattgtcgaaggcatatatcctgataggatgggaagcagattgtgcaacggctcacgcctgaccacgcgacatgcgagcaaatgagcccgaccccaggaactggcagccacatgattcagctctgaaaaggtctttctatttttggcttgaaagcgagctctgaaggtggattcggaggtgacactgctgaaataaagagtggtagacatatttactaagtggatgtgtgagaggtttgaagaaaattgtcattttcccccgctagatgaagaaaaaggcctcgcagttgctgcctaatgcgtagcagcctaggcagagttgcgcctaacctgcccatgcctacaagttgattcgtccgattataccctgtcatcttgtctaggagcacactagacaaccagggttgtttggtgaaggcggtcagagggggttctattaggcggtgacactgtccctggcattatttccatcatcacccttgtcatcaatgctaacaatggtagctgattctgggccacagtcctttcgggatctcgtgcgaaaccataatcgctttcgctttcttgtaggtcctctacagtggacctcgtatcatctcgatctggcggggtgtcgattcgaagatgtcgcaactcccctgtctctgtcacgcttgtctctacagattattctcattacgagaagggtccacgacatcgtattcactgggatgaaattaacgatcctgaagtcttggctattggtccgcaacctgagatgaagcgtgagcgtctgatcaaaatcttggtaggcaaggattgcccatttgcacatactaggtgggagctacaggctggtagtatgaccaatatacccggggtaactgacaacttcaccgagcagcaagggacctcctttcttttttgatcgtcggtctattcaccggccagaatatctcatgtttcataacagtcaagaatcgatcgaggatccctcacgctcattattgggctatgtgcactacacatttgtcaatggatctcgcaatcggcaatatcgtccagctccagggggacgtagcaacgagatcggttggagaatccatctaaagcggaaagctcggacaactccaaaggaatggaccgacgatccatattttgtgtgtcatttgttggctcttgcgcagctaaaagaccgcaaccgcaccgtcaatccatcaaaaccaatcacttacactgtatgttctgtatgcttacattttattggtctatcgcgtcccagctaatttgctccagtcacgtcttctcgcgactcacatacatgaaaaacattttatcatactatatgaggcccagatcacttccgaggtcctgaatgcgctcagtcattggagggatgcaacaacccccatccaatggcctacaattaagcgcaaaagaatcccatatcagccttatgatacgtttgctagccggcttatagcggagataagggaatctaggccttccgacagtctgtcaaatatatcagatggtgtggatagtgtggatgagcacggtggggaacggccatacgaaccagaagatagcgggtcatccaagatgatgaggacttcaaaagaggcgggtctataaggagacctgggggtagcaaattcatcggcataatggactttcttcggatggacaattttgggggcgtttcaggggcgttgtatcaatatttttcatgttctgagcatgagtgatgactatgtagtattctttcaaacagctaacctgtgtttattcttgatacatgactctctcgttcacaaagtttgcataccttgtcaatccttagcacatttttcataacacatttcatcctaaacaatcaagtagttattgcgaagagcttgttgatggtattgatttccgagtaactaaggcacttcatcaaaaaaaaaaatatgataaactatcacaacctcggtatgaagatcaaagcaaaacgatcaaataccgtgatagccaagataaaacaaagctaattaaggacatggctcattcaccaaagccgagagacaagcgtccaccgccccatttaagcagccgtagtcgaggaactcgaggaactcgaggaactgccagaggaagcaccgtcgtcgggaggggccccactaccaccaccggcaccagcattctcattctcaacaccaccgtcctcagtataataagccgcaggggtaacagtggtatcctgtgtagggtccaaaccaacagtgatccaagcgaagattccctcggagatatcgtcgcccagatagatgtattccatgaaggggtcaatgacgtcgagctcttcgccgagaatgctgtcgtcggcgttggtggtcacttcctgtgtgttggttgagtaaggggcgacttcgtcggcggcggtgatgagatcctggtcaaagaagatctgtccgacgtgcgatgaatgagtggtgtagaggccggagatggtgccgttggcgaggactctggtttcgttggctgggtgggcgagaactatgtgtttgttagtattggaattggcttaactaaggggaattgtgtataccgtggatgtgagttgcccggccagtgtaatgacctgggaaggttgtttggaactgaacgacaccgtccctgttactcttctggatacctcggttgaaggtcgtgtcgaggttggtggaatcgttggagtttccgtttccgctggcgacgactccagaatagacaccctatgatgatcgtgtaagtgaaaggttcgtattgtatgtgatatcggggatgcagtatacttacagtggagttgcagtgccacaagtccgtgtagagctgcggaatgggttcgcaggtgttggtgttgatcagctggatgtccaggtagagaggaataccttcctgggactcggcgatgttcttacgaacgagctcaccggtgacatctaaaccgaaacagcgtgagtaagattcaatcacaagaaagatgggaagctaacagtagggtccctgtgtcacctccggtccgagaatgcatgtcgcctcggcgccaaacaacacttcgggatcggtcgaataatccacactcgtgagattggagtgatgcgaggtatccagggcgtcatcggagcgcgccttgaggaagtggttggctatgggtcgttagaacgtggtagtatgttgaagacttcaaaacacaaaacatactatgctgaagaccaaggcggcgacgtatgttcttcacggatgtgtgacgacgggccacgtttcggctttggtggcctcgacgctggagatgagaggtacactgcgcaagactgcgcgagtgaacagaggcctctttcaagaacgcagctcgctcggcggcttcggctttgacatcatgtcccgggtgagcggagacaatgccggtcagagcagtcaggccgacggcaacaatggaagcgagatgaaccatgattgcgttatcgaggcagttgaaggtgaatgagaatgaggaagttgaggataccacagatgggtgtcctggggtgttttataccccttcctgttgcctccctggctaataccaaggcggagcatggctagattcaggatatacccgcttcaggtaaaacaacattttgatgaagctgacgagggatatggcgcagtactgggtccgcattgacaaatgaaacgctgcaagtttctcatcgagaaagagatctaggtaactgcggccccctcagcggagctccgattggattccgatgctacatggcgacaggctgcaattgcgtgccgttgataggacatgcgtagactgtgaaagaggcagatgtttagttcggcactaactctaacccgctgatgaatccaccgtcgatcatcctggaactattgccctgccaaggaggaaatcagccagtgaggatttcgcaatttatcatgcggggaattaaggacgcggccctatgatgatcttctttcagtcttcgtcgcagggtgcagatgtatacgtattcggtcttggcggtcccgtcccggggtcccctgcgagatcagtcagcggagaaaggagcgccgatagctttggctgcatatttgtgcgaaagatcaacaatgaacttgtcggactccgagattgctgccggaaagcgtcggatttggatgcatgcaagacaagacacatgtgccaagctttgccttctaaagaatgcatttcccgttatacttgagctgttcggaccttgaatcttgccaaggcgatgacataattccggaaaggcttggcgattgcttgctctccgaagatctaccgatggctgagtgtggctggtggataaatgtgggttccaaccctatgttgagaatacggagtagctcaactggggtattatcaataattcctatgtcaaaatggtcagtatcaagtataaataggttggtgcctaggtgcatggtagaaggagagaatggaaggactattcgttggttaagtatcaaagtaagtgtagtaggaataaggacacccagtggcctagttggtaactctatcgagcagcacctgctctagacaaccctctaggtcaactgcctggtttagaacactgtcgagaattacgcactcacggctctgggttcaaaccgtttgtccacttttttttaatccttttttttttctcgttccctatattagttcctgaagtatcaagaagtaaaaaaccagcaaacagccgttgtttaagtatcaaagtcaatgtaatagtagcgaaccccagtggcctagtcgatcatgagccatacctgctctaaatcactctctaggtcaactacctgagtttgaatctcctagaccgcgagtcgctgtcgagaacttcgcactcttgttcttttttttccagtatcagtttccgacaaaccttagccttgaaagcatacaggtatgcgatagttaaataatgcctacgaggattaagagaaaaattgtatcaaaaactatcagaattaattccatcatgttaaatgcatattcgtagatattgaagcaatatcgcgttaaaccgtcagctcatgatagagaaataactgaagcaaggccagccaagagggctgggacaacgtaaatggtaggaaacaagagaaccactacgcagaaacagtccgatggattaaacctcctgctgactcacggtagggttaatcttctcgtccaatccaatttcggcagcaaaggtgctgtgaggctgccacttggaggaagtacgaggagtagtctcttccatcatcttgtcaacctgctcaagggtcagacccttggtctcgggaatgaggaagtaggtgtagacaaaggcgcaggtacacagcgaaccccagatgaagaacaccttggcacccaggttacccttgtcggcatccgtcatgtaaggagtgatgactgcgatgatgcagttccagagccagttggaggcggcggagagggcaacgccgcgggatcggataggcagagggaagatttcaccgatgacgacccaagcgccggggccccaggtgctggcaaagaagaagatgtagatgcaaatgaaagcgatcattgcactgacggccttggggttgttgccatcggtaacaccaataatggcgacaatgaactggcacacaaccatacccagggcaccccagaggagcaaaggacgacgaccgtatctctcgatggcgtagaaggagagcggagtggagaagacattgacaatagtggtgatcatgctgatcaggaaggggtccttgattgtgccgagttccttgaagaaagtggttccgaagtagaaaatgaagttgacaccagtccacctatggatcattagttcctgttcaataccagggggaaggtgagacatactgctgcatcatctgtagcgaagtacccaggatagtacgacgaaggttgctattagggtgccaaaggcttccagtgaagcagttgaaccaggtgacgaagtatccaccctgggggattaccaaaagttcgtactggttgttggcgtcgatctcattcagctccatctcgacaaagtccgaatcttctggctggccacggatacgagccagtacaacgcgagccttatccttctgacccttgcggataaagaatcgaggggattcaggcagcaggaacaatccaaaggccaagataacagcccagagcatttggaggccaatggggatccggtacgacccactgtctgtacggttttgggtaccatagttcacgcacgaggctagcatcaaaccaatggtgatgcagaactggtaacccgagacaagagcaccacggaccttgcggggtgcaatctcagacatgtagagaatgatgatagccgagacaaatccgataccgaaaccggaaatgagacgaccggcaacgagaagcccaatgctggttgaagcggtctgtaggatgacaccgacgatgaagatagcgcagccagcgatgatagtaacccgacgaccgaaccaatcagccagatcacccgcgatgagcgcaccgaagaaggttccagcggagagaatggagacaatgagcgactttcgggaggacgggatgacgaattgtgctgcatcagtagtagcaggatcctagtcggttagtgggatactagtaacttggagacattgacactcacgaggccttcaaactcttggatgaagtagtccatgccgagaacaccgctgatgtaaccagagtcataaccgaagaagataccaccaaaggcagcaaaggcacacattaagtaggccttgaatgtgaccggggcctcgacgcgcgtggcgtcgatgggcccagagatgactgctccacctggcatggtagcaagtcgataagagtagatgtggttaagatatctagaaagagatgaagtgggatgtttcaaaataagataatgtgagatgagaggtgggaagaagaagaggaaaggaagggattgggaaggaagagagaatttatattctggggaagacagctacttgagctccaaccccggacctacccccatgtctgaaaaaaaaaacacaaacaaaccaaaacactacagggaaacattaaaaaccagtccaatccacatttggtttgggtgctgcataaaataccagaaatctagaaatcggctggaatgacctgtgtagccaagtcggctctggaagttgaccacgcgatcgaaacggcaagtatagaaaaccggggaagtgttgcacggcctaagccgtaaacctgtcagattggaggctctgattggctggaatccccagaaatgatccgccgatccccccagggctggacaagtgaaaaatacccacaaaacacactaaaaacattaaaaaacataaaaaaacaccttccaaacgtccaaaaccaaacagagccgcgcgtggaaactttgaacccccggagatgtccactttgggacaatgggcccggggaaataaactctaattggctggctttcatgggacaataccccacgtgccccgcaaatactttttgtactgtgactcttacatctgggcagtcaacgggtaactatctactaagttattttactcatttactacctgggtaatactactctctgcaacattagacaatgaaaagatggcttagttatgagcccgggtgactggaaaggactgcagttcacagttcaaactactaaataaaacttaactatatccaagtcaatgtcacatcgatggcaagccatccaaagcacagacccaatggacgccacacaatcccactctccactttaccttaaaggaaaaaaagtcttggcgtcaggcaagctgactatgcaaggatggcggtgtatacagtaagatacagcacgttacaagaatgttaggcttactgctttacaatccaaagggggtatgttcctagccatgtctagaaagaagcaaaacaaaaacaagaccatgctcaacatagtcgaagtgccagctcgtctatcaaacataagattcccgaggacagaaatgggcttttgaggctttcgcccacggggaaaccaaccagttacacgtgggagactatacctgtttcagttctcatctccgcattctggcttggctatcacgtgaagtcggttttagtctgaatgagcgggctattgtcgggacttcgtgctggtccattagctgcctcgcgttgtctcaatggcgcacttgatcgtggcatgctattcgatatcacaaactgtgactctactaaacaaactctcccctgctacccaccaaactctggaatggctaaatacagccaatgctacctcgtgctcgtactcggcttacggggtacagagttgatagacaacttgccatatgttgtctttgaaatggcatgagtgacccactttggacatacgatggagacggaagttggatggtgaactaggattctccgaccgaaaaaatgagaaaacagaggaagccgaggaagaatctccgatgccggtgaacactttccgtaatgggcggtttgtgtttcacttgaggggaaaatgtccatgcacgagatcgagtccggagtaagacgtacctatgccctactccatactcattgaggatatgcagatttttcggatctagcggcttcgggttagtcgcctgggcacgtatagatctggtatgttattacctacgtacatcaatatcctctttgggattctgatacatggcctcgaccatgattcgtggactcccgttttttcccttggtcgaatctgacaccttttggctaccaattgcattttgattgtcctacgttgtactcgttcagggatctctagtcggttgcacctgcgtcaagactcgattcctacagaaacaggtaccaggtacaatcttcattcccaataaacgaaactctccgtgtgaacatgccaaaactacgcgccatgtcgggcctgaatatcaagcccggccaacccgcccgtctgccgccaatcttcaatctccttcacataactcttaatcccctctccccagatactgaactgcgccgcccgcaaggcttcaccgtcgtcaaattggagtccctcccgattgaagtaccccggagtgcaatccatcacacctctgagcgctcgggctctcatcaaaaccttcgaagtccattcctcttcggagcgacagtccggctcaatagtaagcccgggcacggtgacatctgggtttcgctccgagatcaacttgccggcttccgaaatgatgtaggcgacatgaacggcaagctgatcgagaacatagacctggttcgctgatgctcctgcttgatacggacctgggaagaacagattgggaaacccattggtcattactccatggagtgaagtcatgcccttctgccatttttccggcaggatctggttgtcacgtccggtgacggtcatagccccgcgatcggcactacccccaagactgtagccggttccgaaaatgatggtgtccaggtcatactcttggccctctaccaagatgcctttctctgtcacagtccggatcccttttccgttcgtgtccaccagggaaacgtcgggccggttgaatgccgggagaaagttgtcgctgaagcatggccgcttgcaccatccaggataccacggcttcaaagcactagcagtagcgggatcggccacagtggtttccacgcgatggcggatcgcctcttggcgttgcaagtccaattgatgcatccgcgttaggtagtccgggtcaagaccggagggactgccgatcagtacaccgagggactgcatcttggtccaaccatcatcgacaaggtcaacatctgggaggggactctcgttcgagcagaaggcattgaaattctccatgcgctttcgttgccaaccggggcctcctttgatcagtttcgcccaccaggtgcgatcggtgaggtgattgtaacgcgaatccacagaagacggtgtgcgctgaaagacaatcaatttctttgcccacccggcaaggtgtgggatcacctggacggcagatgcgcccgttccgacaaatccaactgtcttgtctcgtagtccatccatcatcgggctgtctggacttccgccggtgtaatcatagtcccagcgcgaggtgtggaaaaccttcccctcgaacgtctcaagcccgtccaatttcggtatcttcggtgaactcagcaacccagtagccaagataacaaaatcagactgtatcgcagtggatcgctggccacgaggtttaatattgacagtccattgagaatcccgctcattccaaaccaagttatcgacctcggtctggaacaaagcccgctggctgagcttccattgactggcaatgcgcttcgcgtgtcgcctcaattccgacccgctgacatacttatgcggcggcatgtacttcgtttcctctagcaagggcatgtaagtgtagctctcgacatcgcagaccaagccggggtatttgttccaccaccacgttcctccaaagccacctgctgcatccacgaagaggatttcactcgcacggaggaatccagattggagcagtcgcactgcgaatagcagacctccgaacccagcaccgacgatgaggactcgggtttgcctctgctggagcatatcggtgttgacgacgatgaattcgttcaagtaggcggggtcatcggtcaagtcaacatattgggttggtccgtcagggcgtaggcgtttcttacgttctgcatcatactggtcttgtatattctgcagatcgtcgcttgtctcagctatactggctatgttggtggtaggttgatcaggaacaggaggcgctaggccaaccacagatttctcggacatcatgacaaggtgatggaaaataaatctctacatgtaaccgagcaagacgaatagggggttataaatgccatcgagagcttcaaacagatacaagatgtttagcaatcggttgtgttgatagtttctagcaaacggaaagcagagcaaacgaagaaaaagaactgggcgtatttaggagatacatacgtattacgtataataagtaagctatagttaaattccgaacgcaaggggccatacagacccgtttggaactcaatccaagagctacgctgaaccctcgtgcatattaaaatgggaccggctgtggattcaccgtgataggtagggtatagggatagactgtaacaagccgcagcgagaaggcgtccgcactgtgcctcgtttactctagcacttcagaaccagagggtagaatgttattactgcggactgtaaattataggacgttaatgttatctgagccaaaacgaaaataaatgtgattggatgttatctgatattagcaatttggacccaggcctacattctcctccttagctggtcaaaggttcctcgaactcaatctacatcccagtggtttgcatgctcagtgttggactggggtagtagtgtcctccgcggttcctcagggataccattctcaccgtccccttcgtcctgcacctccggttgtaaaatacgctgataaccagacctcctgttgacagatcctgtgctcatccaactcatccgatgactggaaatccgaacgaaagcaatctgtacaaagtcgcagaatattagccactacaccacaacacaaatctcactatatcgtatgcagaaacccaccttagccgcgagaacaaaaacagccgccgcaaaaaccatccaagacgtccgctgctggtactccctccacggggcaaagcaactcctctgatatcccaactgcaactcacacgcattgtccccgtgggtgcggtccttgaaaggccatgccctgtcgtgaatacttctgagaccacagcattggagctcatcctggattgaccggatagcctgtgagttcttcgacttgaaaaacccctgccattgttgctccaggttacaagagaggatcctatcggggaagaggtacgcgagtgctaatgtggccacgatggtcgatatggctgtttgggcgtgattgagtatacccgatattgtgttccattgatgattgtgagctgtgtcgttgtttaaacgtgtaaaaaggattcgtgtggctatcagtgtgagtattgtggtcggggaatttaaggtcgcgagggctggaacccatgttggcaaagggagaagcaatgcggaggtgcgagcccaagataacctattccgatgttagttattctcgttgattacatgctagttggagatatgatgaagaaggtagtaactcacgctccaaggaccaaggagatggtcactccctagtggtgaggtttgtcaatagaggtcatcgccaggctggtattcaatatcttaccgcaatgaaaatgacatagagaagaacggttgtatctaacttgaccggcattattgtatatttagtcagatgttttagtcgatgcttgattgaaagaagaagaagaagaagtggacgacatgggcggggtaggaagcggtatagctacagagcataagtaccttatttgaggtaccttgcttttcaggaagaatgtgcttcatctcctttctattgagagtttgaaagtgatatcttattcttttacttgttgcagtctccgcaaatttgggcaacagtagtaacacgaatcgatgttctattacttaaatcctcgatgctatgtcaaccctatagtgcagacatcatatatcccacaggcgagtaattgatagcgatagtgcatgatcttcgtaagccactaccaggcctaagcccgaccagcaagttccttttcgtgcatgggctggacctcctctatcgtaggcacagtatccaatgcgtcgaggatgtcagcgcgaggaccggtgaagttctttcttccatccacaaaccactggaacacggagatgatgataataacagcaaatgctgcaatgcagtagtctatatagaaaggttagtacgaaaaatgtcatagataacctcgcaggttactcactcatactgcttcccgtgaccgtgcttgacggagggaagacgaaaaggacggtagtcaaagcgatatatgataaagcgacctaatcatgattagagatgttcggcttcattcaaattccctggcaacatacaatgtcgacaaaccatccaactgcattaggcaatttccattttctttccgggagcgatttgcgcccctgaagacagttgatggcaatagggattccgtaggacaggtcaagagccacgaccgaggcagagataattgcgttgaacgcactagactctgttagttactattgcgctatcgtgggtgatgatgattaccttgaagagccgaggaagatgcatccgaatgcaatgaccacaacaacactaagaatgagtgcgttgaggggcaatttgagtgttgggtggacctttgcaaagaaccgagaggcaggaaggcctccatctctgtgaagagtcagtatacgcattgtatgccaggaagaatatcaaataccttgcaaatgcaaagatcattcggctactggtggtcatgacgctgattatagcaaagaccaagcagaccaggggcaacctataacctcacgtcagtggaagcacaacaggggaaattttcaccacgtacatcaaaaggcagataccacccgcgttgctcttggtcgcatcgatgaggatctgcagaagaggaccggctgcggaggatgcgaccgtttgcatgtttcctgcgacgaatagaaggacgatcaaaaagatacaaccggtgaagactccgatacccacgcaggtaaccatgattttcggtccctcgatgtcggcattgggcacctctagaaacgcgtgtcagtccctctccctaacttctcaaacccagagtaatctttaccttcgatcatgtgtgccacagcatcctagatagtgttagttgaattggtttagtatcgcaatgaccatgacttacaaaggcagtaacgccaagccctccttgaagcaactggatatatgttagtatcattgcatcgttacaatggatgcagtaaacatacacctagaagccatgcgactccatcaggccctaagctgaattagcaaaatcatcataatagagttatcggggagcatacagccggttgtattgacaaagtcacagaacacgaagctgtggatgtcagtagtctgtcataacttgatactgctgaggatctcatactaagctgtgttgtagttgggagaagcgcatgcgagacatgtaattgacacaatcacaaaccctccaatcgaccacatgactacatatattgttagcgatagcaagtcaagctgggagaggtaacccacaagcaccgcggtaaatgagcggcaagatggagttcatgaaggcattgatgatgaaggaaccgacggtcaatccaacgtagatgaggaattgatgccagcgttgtgggacatagctctgcatatcatgttagcattgtaggaagagtatggagtgagcctctaacctcatgaagaaccgagatgatgccgacaataagttgactggagagaagggagttcgtagcgacgagtgcaacctggttgtgtgttaggttgagtaccacattgaatgattgccttgcctacccagcctgccacattgatccagcctgtaacccatgataggattgggactgtgctcggccacgcgacttcgattcgttagtatgaagtatgacgaggtataggaggggaacatactggctagtaacagagttagggttagtccaggtcatatagcataaagggtctgtagggataggatgactcacctgctacccaatgatattgtccaccggctctgcaaaaggatcagctggtaatataccaaaaggggacatgccggagcttacgtaggatatgccgaaagaaattcagccaacgaacatgcgatacaaagattgcagaatcctgcagtaaccagtcctggatgcgtgtcagcgaggtagaaaccaagtatttctaaccaacgtaccccaaatcacactggtacttccaccagatgtaagactgatcgacaaactggccgaaagcgcagtccacgactagcttggttagccaaatatcccggtcgcaatccaggtctgacatacattaagaaccgcaaaggccagaccaagcatcgacctagagagtcctgtcagtatcaagcctgcatatgctagcgcatcccttaccatgtcgaatgactacgttggagttcaggcttatggcccaaagccgccaacttggcatcatcgccttggagtgaatcgtccttcatactggataccggtttccgacgtgaatatttacaaatctaagaactgaggagaagacgatcgctctaagtacgtcccccgttcacacgtatcaggaaggcattgccagacgggttctctttacggttaagctccgataggggattgactattccatatgcggggaagctgtgtagctgcaaagtatcttatcgaggaggcttgacaggcttgggaggcttatcaagagagtttatacgctaggctgctagtcgatgtcgcatggacttgcccaacatcgtatagtctcgccaccggcaattaaaacaacggcaaaattgggcctttaaattaattcttccattcaatcgagggagcttagtaaaatataatgcatcatattgtacaatccaatttcgagatgtcaacgttaagttgctatcttgcaggaatcaggtccccgccttaattaattaattaaatctcaaatagaacataatgccacgtgactatgtttgcttatttgctatatctttatcaactgcttcatcattaaggggctaaatccaatgggaatcaggtagaattacctaccatggagtgccgtttaggcccgtgtgtttgagttaaagcctgctccgttttcttttttttataaatccacctatacttatttctacctactaaagagggaaccctgcaacggggacagtaggggcaccgacatctctgcctgcaaaacaggtgtgagaggagagttatcactgggagttgtagggtgctagagaggagaacaccatggggtgactactgagaagtgaattggaaaggtgtctgcctctcacatggccgcttaatcgtcctacactggaaacccccactgcactacatatgtagtccgcttacaggaatccagcaagaatgataatttcaagtggaccgagcgacctgtgtctgattgtacagctgaatgatgggtttggtgccactattacattagctgaaaatgtcgagagcaagactggttggacggaccgaagacggtgcgatgaatgtggagtcgatgaaggtattgcccagcgtgaggatgcctcaaaggtgtaacgatgaggctcacagatccccccgctgagtgtagaaggtcgatcagaagatgtatgtttttggtaagaaaacagtggcagcatgctgttgaaggcttatcgcgtctttggaaggatccacagggagcagatcaggaaaagcagccttgattgatataaaagaagagaagctagagaagcagagatctgggagaaatggaagaggcagggtcaccttcattaccctcaccttcatttaccttcatccttactgttacgattcactcgtcatactcctgtttgcctatttgcttgattgcttgttcgctagttcgcattagctagattgttcgctagatagaagtttgcattgtttgtaaaggggatagctatattaactagctgctttctactttacaatttgcttcttctttctccctatcttagttatttcgaagttatttcgagtagaatgcactctgcttcctttgcaagatctggcacgtcacacttaccttcatccttaccttcatcaccaattcttcatcgacctttaccagccttgccatcgtttttgctagatagctaggtatctatgtgtcgtcgtagtaaagtttacagacaggcacgcccgccacctccttttgaagaagataaggcccaagtgcaagctacctagggtgtcctttgcctagattgtcgtcaattcaagcttcgatcacatagctgtgacccagtttgccaaacctgcggcgatcattttaccccacagactggctgtccagatttgtgtgatgctgctccctgctgtggctgttgcattaagaaacttattgatgaatcgtctgaatcttttgtgatcggcgccaacgggttgccagtccagaaggtatagttatcttgctacttgtaagtagttcatacccactaatgggatttttcttcttttaggttattttccctcatttacgacccatcattgaaatacttctcgacttattctttcagagtagaccttagaggttgattttatccgtgccccctactataccttagtcaaatctgtcggaggcgtagacgcctttacggatatggtatacaatacgattttaccaggaatcagggcttcttagggcaatctttttaccatggaattgtacgttatgctatcttgcgtttcatctctctattgtggatttattctaattgccctaaacaaaaaataccccgcacatttatgataacgaagtattaggttatatatatagagtggatagttatcgagatatcacctagttgtagatatatatttcagtattttctataatcggagagaggaatgtccagccgagagtcagccctacattgttaagggacggccttgaagaaatgcaatgtacaacatacatttaataatatttggtgattgcaaagttacttcaaatgaggttataaatgtacatgatcaacctgatagcaataactccagatatgcctattctcagcgcatatagtgccttggaatccaccaaatgccaaatccgatcccaggtcccaaatccaaatcccaaactccattcaaacccaaatcgcaaatcgagcagaaaagtacatcctccagtggttcaagacgaccagcatcttgaagtacgatcttgaagtacgaatccgatgttcaatgtatcatcgagaatacgtgtcgagtgcatgttggagttcatgcaaactattcttgtcgccgtacgcgtccatcaactgttggtttcgagccaggcgctgctcttcctctagcagagcttgttcccgacgtaacttggcagcgacgtaataattgtatgctccaaaccctgcacgtgccatagttagtatggcccacaccaccccggaagaatacgcattgaacataccgagaccaattgtggccatgaaaggaatcaggctaaagtaaagcgagtcagtaaaccatcccaaaagagaaaaaaggggcggcataacgtacagccgcccattccgaggcttaaaagtggttctggttgggtttccgtatggtttgttcgcaccggggagagcaaattgagacaacatggtatatattttgtatgtcgatgttcctgggggagtatagtttggatattcaggagtatggaagtgaaaaagggaaaaaagtaaagaaaccaaggagtaaaggagcaatagagcgaaagccggcttaatggggtaacggaagagacggattgcggggaataatgacgttaagtgccgaggatcgcttcttataccgccagccctcttataccgccaggggaggggagatcatgccacgtccactgatcatcatcatacaattgtgtggtgttgtctagagcaaaagtcctacgacttggagtatgttacattgaaatcatatcataattgaatcatcgtgtcgtgtgttacctgcattcggaaaagatcaaacccgcctcgtcagtgtctcgcctataattgattgttaactgcataaattccatttgccgaagaatcatatgagaccgacggcctgaagcctgatcgtccaagtgccttaattgccgtttaattgccattgttctgaggggcaggagttgccggaccctccggggtcacataagcctaggataattcgtcagcgcaatccggggaaattaccccatacggagcatttaccttggtcattccaccatcgactacaaagtccgttccgttcacgaagctgctctcgtcgctggccaggaaaaccacagcgtgagcctgctcaatgggttcaccaaaccgaccggtggggaagtgcacctcccggcggaaccgcttggccttgtcatcacccagccagtcttgcagaagaggggtgctataccgcgtgagctaatctcacaaaaacccagtaggaaaacttactttaggggagccggacagagagcgttgaaacggaatccctcacgagcgtgaacgatcgccaactcccgagtcatcgccaggaccgcacccttactcgccgtgtacgcaagctggggagtggcggcaccaaccaaggccacgacactagctgtgttgatgatactgccacgggacttcttgtggcgacgcagactgaggacggcgtgcttgctgccgaaccagacacccttaacattaatgttctgtgtgaggtcccagatcttctcgggggtatcgatggcatctgcgtcgttggcgtgcatgattccggcgttgttgaaaatcacgtcggtgcctccccagctatcctgtgactcaaccattgcctgcacatccgattccttggacacatcacatcggatcgactcgactcgagcggtgggaaccaattccttcaccttggccagtccctttgcgagggcgggctcggagacatcggccatcaggacattggcaccctctcgggcgaagagaatactggtttcgaggccgatgccactatccaagttcggaatcggttaggcttgtgacggcattgtatttttcagggataaacaatccacatacccgcctgcacctgtgatgatggcattcttgccttggagacgtcctcggggagtagtggcagccattatgaccttatcttgagctctgtttgtataaatggaatctagattagcaatgactcaaccgccaacattacagcgtgtgatatatctatagaaaacgctagaaggaggccacccacatgaactgagaattcgaattaatatgagagttgtctatcagtgtgttgctccaaaggaatatacgcggggcacgtgggcagcgtggatcccattagataagcggtgacggtgtttgcccgaagcggtaaggcgacaccgatatccgctgataagcttccaagctgtccaggtgcgttggcctgtcgatttgcttgatttacccgatttgtctgacttggaacgagactgttatcgctttgtcccgtctttatcttgcttcccctcacctatttctatcctttggatccctatactcccaatctcactctttggccagatccatcatgtcgagccccgcagaccccgaggtcacagtcgagaatgtcgccgagatcctcaagaatgacacaaaagtgaaggtggctggagtcgatgtggatggaattctgcgcggaaaactcatgaagaaagataagttcttgtctgtcatcaccgagggcttcgggttctgctctgtgatcttcggctgggaccaacatgatgcgacgtactataaggagctggccatcagcaacaagcagaacggataccgcgaccttctcgcagtcccagatttgcgcagtttccgtcgcatcccttgggagaacaatgtgcccttcttcctcatcagcttcttggatccagagacacgggagccggtgtgcgcctgtccacgaggattaataaagactgcggctgccaaagccgaggcggcgggctatcgggcgatggcaggaggtatgtccgatcgcagaccagggtgtgtgagattcaatggctgatcaggatattacccagcggaatatgaattctaccaatttcgcacgccgggcaaccatgtcacccccgagcaaggcgcatctgcaacagccgccttcctcaagtcgaatccagtcgatgcattgccgccagtgacagaaggcatgtttggttattcaatcactcggcccctccacaaccaagattactattatggcattttcgacgcctgtgagaagttccgatgcgatattgaagggtggcatactgaaagtggaccaggagtctatgaagctgttagtgccatgatagtacacggtcgtattgggactaaacattgtgataggcactacaatttggcgaagcaaaggacatggctgacaaggcggggttgttcaagtgggtttgttcctttgctagtgcgggctgggccagctaacttgttataggtacgtcgtcaaatcattcggaatcaagcatggcattaccccatgcttcatggccaaaccccgacaaggcctgccagggaacagcggacacatgcacatctcgctcgtcacggccgacgggaagaatgccttcattcgtgataccccggatccatccccgctctaccccgatatcgctcatctatccgacttgggtcgacacttccttgctggccttctcgtcggcctaccggatatcatgccgatcttggccccgacgatcaattcctacaaacgcctggtggagaacttctgggcgccggtcacagtctcctggggactggagcaccgggccgcatcaatccgtctgattaccccaccgacagctagtccgaaagcgaccaggtttgaggtgcgagtgccgggtgcggacaccaatgcgcatctcgtcctggcggcgatcctagcattgggatggcgcggagtcgagaagaagctcgagattcccttgccgcctcttgctcgcggcgaggatatgggcggtgccagtgacaagggtgtgcgtctggccaaatccttgaaagaggcggtcgttacatttacgcgaccggagagtatcgcacgagaagtgtttggcgatttattcgtcgatcactttgccggaactcgggaacacgaggtgcgcttgtgggaggaggcggtgactgattggtatgtgacatcattaccccgtactcattcgtatactgacaagttcacagggagatgaagcgatacatcgagaccgtgtaaatgccgtatttcttctcatatcgatttttgatttacacagagacacgggttagcagaatgaagaattgtacatagtcgcattggcctagagattggtgaagggtgtgtaaggcacgagattagcaggcatactaccccagatatataccaaatgacattcaacgaattggaagttgtcgatttgccggagttcggatgtattctatatatatcgagttgtcacatgccgatgaacacagggtgacgcagaaaaccgccgggacaactcggcttcggatgtgacactctgaaccctgcgagatatgggcgatcagagacaaccgcggttgattggagtttccggggaatgcggagagcttctactccgtacagccactttcgggtgaagcagggggcgaattgtgcaaagcttgctattacccttctttattatcattctaaacaacggtcaagctgtagaactgtgttcttcgaaagataccgacgtggacagcctaatcagactcggtgtgcggcgtacgccgttctaattgcgatcgtgtatagaactaatataagcttaaaaggtgaagatcgggaaatgtcggccgagaggaagagtttcccgtggaaaacccatgaaaagtcgtccatcgaacgcgtttcggtatcagaaagacacagaagagtcgggaaattataagaagcgacacggtcaaacggggaaaatgggggacaatcggctttccggcttatcattgggcgggtccagaacaaccgcggcaacttttgggtgactctgacgtattcgataccctcgggcagatggctatataggaacaatatcactcaggcttttcctgctttctgctctgtggaatttgaaaattgacgttctatacatggaataatactgcacacactacccatctacatattccatacacatacgtcatgtctttcgtcgaaacacagctcaaggatgtcgctatcctaggcgccatcaacaacgatgctcgcaagatcctgaccaaggaggcatgtgccttcttggctatgctgcaccgcaccttcaaccctacccgcaaagctcttctgcagcgccgtgtcgagcgccaggccgagcttgataagggaaacctcctcgacttcctccccgagactaagcacatccgtgagaatgacgcatggaagggtgctcctcccgcccccggtctcgtcgaccgtcgtgttgagattaccggccccactgaccgcaagatggtcgtgaacgccttgaactccgatgtctggacttacatggccgattttgaggattccagcgcccccacctgggacaacatggtcaacggccaggtcaacttgtacgacgctatccgtcgccaggtcgacttcaagcagggagagaaggagtacaagctccgcactgaccgcaccttgcccactctgattgcccgtgcccgtggctggcacctcgaggagaagcacttcaccgtgaacggcgagcccatctccggcagtctgttcgatttcggtctgtacttcttccacaacgccaaggagctcgtcgcccgcggcgccggtccttacttctacctccccaagatggagtcccacttggaggctcgtctctggaacgacgtcttcaacctgtcccaggacttcgtcggtctgccccgcggaaccatccgtggaaccgtcctcatcgagaccatcaccgccgcgttcgagatggacgagatcatctacgagctccgcgatcacagctccggtctcaactgcggccgctgggattacatcttctccttcatcaagaaattccgcaaccaccccaacttcgtcctccccgaccgctctgacgtcaccatgaccgtacccttcatggacgcctacgtgaagctcctcatcaagacctgccaccgtcgtggcgtccacgccatgggcggcatggccgcacagatccccatcaagaacgaccccgccgccaacgacaaggccatggagagcgtccgcgccgacaagctgcgcgaagtgcgcgccggccacgacggcacctgggttgcccaccccgccctggcccacattgcctccgacgtgttcaacacctacatgcccacacccaaccagctcttcatccgccgtgaggaagtgcacatcaccgccaacgacctcctcaacaccaacgtccccggcaagatcaccgaggaaggcatccgcaagaacctgaacatcggcctcagctacatggagggctggctccgcggtgtcggctgcgtgcccatcaactacctcatggaagacgccgccacagccgaggtctcccgcagccagctgtggcagtggacccgccacaacgtcctcactgccgagggcaagcgcatggacaaagccttcgcgctgcgtctgctgcaggagcaggctgatagccttgctgctcagggtgccaagggcaacaagtaccagcttgctgctcgctacttcgctggccaggttaccggtgaggattacgccgatttcttgaccagcttgctgtacaatgagatctcctctgctggtagtgctgctaagctttgaatgggctttaattttatgatgatgaataccctttgtttatttttgtctggtcttgactttatcgccagattaccatctgcagttagcatagttgtataaaatttattttattccgattacttttaccagtatttcgatgagttatttcgttgtagtagatgaattgctaggattccatttcccaccattctcttacaaccgacagcgccgccgttagtcgaggacctcggcaattagacggcattcgaatagaccgcactttaggtcaatatattccgagacgaatatttcgcatacaggcagtgcttacggcaacttataattctcaataatctacgaagataaaaagaaagatatatcgggtcatgtgattaaagcaatatgcgagacccccttgtttcagtttgtagccaaatccagtccaagaatcattccttcctcatattccgacaaaaaagaaatgtcctctcgctttttagatctctctggagataccatcctccaagagcaagtccttggatgtggatcttcagcggttgtagttctgcgtgacggcctagccgtcaaaacacccctaagatatatttggagctcagatatcgacagatatcgaggttcagatgaatattgaagtcatccaacgtgaacaagatgtctatcgtcggtttcaagaatctaatacccaatgtggcggtattgttaactgccttggtttcttaagagaagctacctagctcacttatatggcaaatggcgatcttcgcacctacttagcaaccaaaagaccacctcaacagctccaactttcatggtttcgcgatatggctcgcgcgctcgagtatatccacgatcgacgtgtgcttgtggcagatattgcgagtcgaaacttccttctcgattcagatctaacaatcaaattctgcgatttctccgaagcatctcttctacccttggataccgatatggattctgtcgatgacaacggatacacagctcgaatagacattggctttctcggggcagttatctatgaagttgtgactggcgagaaatgcgaaatcgatctctttaaagataaccttccgagtgatggccgcgctacctggccgcggagagagttccttcccaataccgaaaatgtttggcttggatcgatcattgaagactgctgcgtcgacgggggatttcgaaatgcgcatagcttgctacgagcactagattcaatcactctatattccccaagccccaaatctttatatgatcgaccttcattgacagaatttatccaaaacttggtcgatgggcggtcgattgtaagactggcagtcatcctcggtgccttgggtacgttcgccctatatatgaatagaaaacagctgtcaatgtcttgataatctatgtgcttgatgttctatattttgtttcggatcgctacttcggctgataatatccctctctctggttattcttctgtcaagcatcaacaccggtacgccaagagactatttcagtctattatacctctccctcgctcgcgtacttgtttttgcgataaggtcccaatccaagcttcaacgtcgaaaaatctcacataccaccaaagtcggtggtaaaaaaggtgaccgtgattcaggtggatcaattcggtagcctatgcataatatgggtgacttgatagagaaaatatttatactaacgtcgttgacttgatgttttgcaataggccctcgtatatgcgtgtccgacatgacggcagggggatgcctatcagttaggcaactggacaccgtagcaaaaacattcaatattgtcatcaaagagggttgtttgggcgaagagaagatggatcaaggaggggtagggtaggcacgttgtgcgtgcatgtagatatatcgcctgacattgaaattaggcccctcctactacccctcgccaacaccaatctagaaatattctagtttaaatcgacaggttgattatctcaaggtaagtgacaaaaacactcgaatgatggctaggccaacccttcaccaggaatccacattatgatccacaaagatcttcctccttcggtcgaatccatccgcagaatcatgaaggaactgatgcctgaaactgctacatcaccgaataaactagccgaaaaccaagcagcgatatttcacgaaaacaaaaatggaaacaaagcatatcggggagacttactcgcgaaacaaatctctcttctcacgatacaactccgcgtcacggaaaagctgcaaatcggtactgtatgtccattgattatcatttactttgcagacaacggactcatcagaatataggattggcgatggcatttagtgcatttttcgaaagataccaaacttgagaacgttcggaaggaaggttacttgatcgtattatccaataccatcaccataacgcctggaggagtactcaaagagggatcatacatctatatcatcaatgagcctgtcataagtgcaggggcaactgccatatttattgttcctccgcctcttgactaggtaggacgtgggtacttctatttagcttatgtgtactccgtacatacactttgatgtgttctttcggggttcagactggcaattatttatctctgtaaattactgagaattgtatcatcgaagaaagaaattctcaggttgacgaaataggctcagagaaagacgactcaacacaactcccaccttcgccaaataaagccgatatccacggcgtagcaacagaggttggttgtatttcgggtccctgaaccgttctcgaaattggggtcattgcgttctcgagtccagccatggctcgatcatcttgataggggaggtagtccatcgacagggaatcctcaaaaaggttgtatgaggtctcggccacagcctgatcgtcttgaaagggaaagtggtgcggtcctccgatgggctgggattcctggtttgtctcaccgttcaaattgcttctagattatgcttctaatcgtatcgaagcacccggagacataatgatacgagcatggcgatgcagtggttcatatcggatgggggagtttttaattcccaattcgggttacacatatatattgtatagttgcgattccccgactgtaactgaaatttcctgcttaatgcgagaaacaatgccagtatgcccggagacttgtatctcgcggaggggcagtcgcggactggtgcccaacatcagcgctccccgcatcaaaaagcggagtcatgtgacgtcatgtgactatgttcacgagtcaagcctttgacgtacttcacgtatttcaccagtatccacctcagtttcgacaattataattagccaaacgatactctccacctacaatcacgcgaattccctaatacccaggtaccccctaaaccaggcgatccaaagagggtggtgtagagcatggttgaagtacagccaagggaaatcgttagtatcgtaagatgtaaggagcggacgacaatttgattcatgggactgcaagtctttcgcggaacccaggggttgtcgtaatatacaccagagaccgatgagcctggacgcacggtctgctgtaatgtaaccctaatgtgctatatagttagctcgatcgccatgggagaggctaaaagcccgggattcacgccactgtctcaggattgctcaaactaccatgacccacacgccatttcgcatgagaacaatacgcatgggatcgatattccactgcgctatgaatctttctgtacatctgggacggttcctactaaattcgaaacatgatcttgctcgcagctttatagctcatatcccgaaagctaggtgtaaatggcggaccctgataaagtccggattgtatgtatgacgaatgtattcctgcagcctacaatggagccaaatccctgccctagcccattccttccatcatgcaatgttactttttgaacgtgtccgatactaaataatgagttagctttgaactaagacattatgtgatctgctcttaattgtgctataagtcgacaaattcccctgtctaaaagctcgaatcgtataagagagaaagacaattgcctaagaatatccttcaaccggtatggagtcttatttacaccgaactcttgagagattattgaccccgctctctgttttccagcgcccagtggacctctatgatgttaccgaaaagcttctttggatctttattccttgcggtaacaactgtttcaaccttcgcaatgtcaacagcccgttacacagtaccaattcacgaatcgatccaaattttggagactcgtcaacaactgaatgatatggcgaggcaatacccactcggaactatggacgacaggaatggaggctattatctcttagactatgatgataccgttctagctatcgcatctgatcccctatgtgaagaactggatgctgcaatcgaggcagcagaacggtaccgcagcgcccattccgaaatcgacgatgaaagcgaattcgctacacctacctcaaagtgacagggacaggcacactctgacctgtctaagcgttcttgtacccatccatgctgcaacgcatatgcccgctgtcggacctacagctattgccacgtgtgcgctagaagctatcgttagtgtttctgagcaggtcggagactaggctgatacggaaactctacatgttgacctcaattgtttagaactgctcaaaaccagagcaaaattcaaattcggcgagcttcaaaatcctttcaaattattcgagtcctttcttctattttattcgtgtatatgatgaaccataattgtggatgacacctatgtatatcaactgcagcttcacatattagttattcttctgtttatatagctagtaaaatcgctctctatatcctccacagaatggtacttaatgatgaatctctatacagaaagagacggtggcatttactatagaaaggggcggacccagagaaagactgaaggaaatagggattaagtgttactattcgccacgttcctcgttgttcttctcatcaaagcaaatacacagagccgcgattaatgctgcatccacaccaggtgccacaacaacggcgtaggtctgctggccaaacacaaggtcacggccgctaagcaatttccggtcaatgcgagccaccgttttgccgcttttatggtcgacaatgtcggcagtacgatcgaaccagcctccttttatattgaaaatcaccgccttgccattactatcagtgaaagtggcggtggctttggagccaagcactggtgcagttagtaatgtgtataatatgtctactttgctgaatatcttggatcataaagacggcacttacatgtgagattactcttaacctcacaaatcttctcgcgatgggtgtcttcgattgcataggtcgcatgcacgtgtagaagctccctgacaatatcaaacaggtgcttgccatgggcgtcctcgacctttttgcggccagaaagcgatacccacgctccgtgcactttcaaaattgggtcaccattggccaatttgacgtcgaagctatccccagacgcggagagcaccttctctctcaggactagtgtctgcggctcctttgcgacaaattgttcgaacagggcgattggctcggcgaatggctcgagattgtggtgacccaggatgcccatgacgacaggtggattcaattgaagctttcgaaggataaagattaaataatcaaacagggcaatcgaccacaggagcgcggggtcagtctgaagccgatcatcggttggcgatatcatcacgtgatagcttgaagaaggtttactctccttggctggagcattggtggttgttttttccgatcgcctcgcacctttggtcacgatgtagccaatagttataaacgagtgatttgtgaggcgaattcgaattcctgagctttgttccttcaggagtttctattagcattatagtgtaagtactccgccactagcatacgcggtcgttttagagctcttccacccgaccagctcgttctcttcaatttatttctctccaaaatacccaaataacgaattctgcgctctgtttttgtcaagtgaactatctcttcagcgccaagattgttgatcgcgatctccaacgatcatcactggcccattcgccctaaccccacttcattggtagaattcaaccgaacccggaaaacccggcgaacctcatgctaatatcaaaatagcttcttttcctgaatttaattgatcgttggccagcaacatgctggatattgtgtggaaggatatggcgcccactgtggctgtcgtgggaatctcccttataggcttgcgccggtattccaagttcaccgaggcccaacgagtcgtctttcagattgggcttgtttgctctattctgggactttctctgtttgtcgtgactcagttgctgggtctcgtatcttacaaggatatttaagcttatgtgtgatggggcatttcgcgacatcgattatactgtaatgcgtcttcgcgtgcgcgtggataggcgtgccaattcgcgcgtttctgtttcgacgggttttaagtcttcgattttctcgtctatgctcaccaaatcctccgcaatctcatatggtgcttgatctgagctagattatgggagtacgtagtataaatgacggagccggctaaaaggtccaattgctagcaatttccgctatctacgccggtttcggtaactccaacgccgataataatgagagcgatcattacctaccccgccagacaacgagctatcaccgatcagcgctaacaacatccatccttttcaaccgcggatgttcgacagaaacacgaaacgctcactgggatgtctgcagatgccaaggcaatgtcgcgtgcaggttcgataaaagccgcttcggtagtctttccaaggcgagtgagacattcatataagccatgcaacccccacacattgttgagctttgccctacgccgaggatagtccagggcaaatccaagatcctgtttgaacagcacttctgcctcctcggcgcgattctgctccaggagcaagccgccgagggcatggcggactggctgcatccaggggggcgggtcagagtacgcaagtccatcctcgcgcacaatagcttccctgagaaaggaaaatccgttctcaatgtttcctttccggtactccaattctccagcaagcatggccgaggctacccctagaacgtcttcctccttgcatggtatgctgttgagtcgggtactagggactgccctgcgtgccgcttcaaattctacctgggcattttcggcttctgcaatccgtccaagtgcgctaaacgcaagaccacgggtgtaataaatgatagctgtggtcacgcaatatgtatcacgatccgtgggaagctcaaggctgagaacctcctcccaacggccaaaacgcactaggacatgtgccttgctccccacaaagctttcgataaagtctgccatcgggggacttttgatcgccagcacttgaggatatatgaccttttcgagcttttcggcagcagagattgcgtccgagaagcgaccggacatcatagcggaatacaatttcgcacagatataatgtacccggtaggctgtgtacataattgtgcccgtctctcgggcaaaatagatgtcgtcggcaagcatcgcttgatgattggagtcgataccacggcggtagtcgcccactgccgcatcgatgtgcgtcggcatatgcaacatgtgcgaagcatgcggaaccatcccacgcagtcgatctgcagccggtagagccaattctgggaatggagacatctccaacatgtgtatatacagatgacagagtgccggatgatcgtgaccggtagtctgcttcagccccagctcaatgacctcgcgagcctcgaccgtgtgatttcctgtaggtttgccgctatccaaatcccacagcccgcgtggggtgatacacatcagtgcatcggcgaacagagcagcgacgtccatatcgttgctgaatttctgatacacagggcgcatggcatttgcgtatgcgtggtcaaaaggacttaggtcgtcggggatgtcatggacggatggaaagcgggcaccgatggcttcgatcaatgcctgttcgactggggtagcatgacttaccagcttgcgtgctcgttctaggacattattgaccttctcgatagaagcccggcgaccttttggatcaaagaacttccaagccttgttgtaattcggcccggcagcgtaggcgactccccataacgctatcgcgcagttggggtcactgtccgctgcgcgttggaagcatcgctctgcctcatcatggttgaaagaaaatgcccatatcagtccgcgatcgaaccacagttgggtttctgccgaagaggtggtcactggtcgatgatgcgagccaagatcgtaataggtttcttggtccgaggcaggagatttggactggtccctaattgaggtattacattagaatccgaattatcagaacccgagacactcactgcatgctgggtactatggtcttgcgaggagatcacaccgtggtttcctctaccgtttaggtttccttcaatccaactttcttttcccgtgagaacagaaattgatgatgagcgaatcaagcttggtctagacaggacggaagctgatgaaagaatgaagcatcgagatgataagtggcaaaagagagagataaggaagaagatcggggtttaccccgccttttaaagccacccgtggaccttctgagtttatctacgacatgacccacattagatctatatatcaaggagcatagtacatttgcacgatgcgtctcgacagcaagtgggccgctctactcccggtcattcaagatatctgcaacatctcgggtatcccagggctgtcgctgggcatcgtggagaataacaaaaccgtataccccccttcgctgcacaactttcgtgctagggtccctcaccaaaagcctgacggctgctctagtagcctctcttcatgacgtcggtatcattccctcatgggatgctccattgaagacgttgctaccagagtttcatcgcgaagatatctacggcgaaattactctcaccgatctgcttacataccgtaccgacctagcatctcttgactctctctggctcgcctcgaacaatgttccttatctgcctcgatcggaggtcgttcgaatcctcaattacgccccgggtatccagccattttgaacacagttcatttacaacaacttcagctacgaggtactcggccaggtgattgaaaaggcgtcgggtgaaatatttgcagaggttctgcagagtcgccttctcagcccgctcggtatgcaccgaacatattacacaggggagagcagtgaaaacgaagcgaagccctatgctgcgctagaggacgggtctattgtccctattgcaccgccactgcatggtgagaatgtgttgatggggccagccggtggttttcgaagctctgtcaatgatttattgaccctctataaagccttcatgggtgctgctcttcatgagattattcatccagacacgggcttgcctgatcagtccaagtccaccattcgaggtatcaatcagctatggaaagggcatcaatccctgccctttcattccctcagggagcattcgtatggatttggctgggcccgggccgacctttggcactggaacatgaagtttttcttgaatctccaaatacaagttagcgtgtcctgttgcaaaatcccccaaatgtataatctcttacaaattgcatggttgctacttcagaggctgtggtgtagtgggctggtcccgaattggggtttggtattttgacaatcagctgcttcccatcttgcatcgtcgcgaggaatactttgttaaagttcccctctggtagccttgacaaattcagacagactgcatcttgacctgcagcttcttcggcgatgtcgatgagtgcatttacgtcggattggatgtatctgcgtcgtaattgctctgattcgttccataaccatctctgagcgaaataactgtaataaggctccaggtcggaacctatcacttggtgagtcggagataatgtaataaacaaagcaacctaccagatttggctcttcatctgctgggcgacatggtgaattttcgagtgatgtgatgcatgggtaatttcagggggttgaatctaatccgagagttcttacaagcttgaaaaatcattttgggacgacgcagtatggcgataatatgtgagtgaagttgggttggtttgccagggggattctgctcgtacatgacggagcgaaaaaggaaacaattgaggttggctgatatttgtggcagcctgcagatggcatggtctaaacacataagtcgtattaatggagtgaaattgagaataccgaggtatctctcaagaaaggccaattccgaccccattgctcgagacagccaagtacaatcgaatatagcgtggtaattccgaaatggccaaagaatacaagatcaacgacaccaagtattcaacttcattatctatatccttctcagggccacacctaacaataatcctgtacaatccaaataccagctataaactcaaccacttagacgtactcccaagcaaccggggtgctagtgttgacagagacagccagagcatcgaagccgaggcagtcaccaaccttgccagtggggacagtagcgttctgcagagcagcaaaaacctgccacttaggggcagcagcgccccggcgggaacggcgggagctggtggtactgttggtggtaccgttggcagtagggcaagccatgaagccagatgcacccaggccattgaaggtccagtggccgaaagaggcaccgggagtgtagacgaagggaccatcagaggaaccaacgggctcgtaggcagagtggggagatgtgaagcgcagagcacccttgttatcaacgtagatagcctggccaccggggacctcgacatcctggatatgaagttagcaaatggagcattggaaatatacatgtatcagtatttctaaccaagtagtgtccgttggcaatcacggtctggttggtgttgggaattccggggacgggagaataggtgtaggcgttgccaccgagccagaagtagctgccggcggcattgaggggcagcaggtggacgggagaagccgagcgggcagagatgacgctgaaggcagcatcggagctgttggcctgcttagagccggggatggcagccaccagaggggcgagggcgagaatagcagagaacttcatcttgagggataggggaagtgattgatactgaggatgagagaattatcaatgaagagagatattcaggggatctgtcagggtcatatataaggtacgctcggaaaggaacgtgcttaggcaactccataagcggacccagctgagaaatcttgtgatcgacattgaatccggtggagccgagttgaagagaaagagggaaatgtcttacctagacgatacaacataatcctgttcgatatatatagagatgggagtatgtatagggagcctggaaggcccaagatgggaggaaaccctaattaggtaggagtgacaacaaacaggtcacatacatcagcagtatatctctacccaccgtctacttggactattgagaggggcttcaacacggtggagatcgactaactggaccacaaatgtaggtattccccttcacggtgtcaattgacgcaaaagtagacaccccaattgatccaaaacacatgctgttggaccctgaagatcccaatagaagagccggaaaaagctgtttcagagaactcatgaaagttcgacagtgattaaagatcgaccggaggtccgacagactttgcccctaagaaaaaagaagagaacggcaacctcttagctgcgccatatggggatccacgatatccacattgtctcagggcacatcgtctttgccatcatcattggctgtgtcgtcaactggcgtgatatcggttatctatcgtgagtggctgtattgctattttaatttagaagttctcgaatgtctcgaatgtgtcgactgaataactatatcatacctcggttgatagcattgccaccgtccgatgtatatattgtctcacataaatggattgatgatgtggaataatcaggatataacagccctaccagcgtagccaaccccccaaagtacatactccgtagtagattgtttattgtaggaaaaggcttacaataagtgggataattccacaaacttcctcgtacaccccacgatgtttttgataaaaggggcatttaatatgatgtcagtgatatgatgtcaggtgacccacccttttctccgtgacgcgatggaaatagaacaacaatcaaccaaacttgtgcttaatcattttcagaaggtctacaagatcatgggcatcgaagagtgaatggcttccccacgtgccaaggccggagcttcgcgctcggtcaaattctccccttccacgcgtcgcggctatacgtcactcccgaattcaacagtcgaacactcaatctcacagagcaatttgggacaaaatgacgacctggacactccttcaagtggggatgagtccatcgagcaggccaatataaaactcctacctttgaaacaaggtagagctcgagattcacggctctcgagccccaaaacaaatgaaccgaaccccactatcaatgtccccgacgacgagcgtgatgcatcagagcgaataaaagagattctcgaggcgaatggcaccattccattgaactcattctcgacagatttggaggaaggacattcggacagagactctctggttctcagtgatcgatatagtgacgactatggtatcccgtctgacaagggcctgcttttgaacgatataaagcgtgaagatgtgggaaagggctctgactggaggtcattgttccgtctgacttcctggtggaacgttctcggcttgttgataatcgccctactggtagtatggttttcgctcaggggactgggctggtcttctgtcggagctgccattggtgaatttgtaggtctttcttccttttcgtctggtcatttgaagacaagaaatcagcctctaacaatcacagcaagcggtcccctggtaccctactcccctcggcggaacgagcgaacaatggaaggagagctatgccaaagctcagaaaatggtcagagaaatgagcctcgccgaaaaagtgaacgttacaactggaacaggctggcaaatgggactctgtgttggcaatacgggtaggcccttgatatccgttcgctaccatggctatgcaaactctaacgcgaactgggttgtctagcacctgccgaactcgtcaaatttccctccctttgcctacaagacggtcctctcggactcagatttgcgcacaacattacagctttccccgcagggatcaccacgggtgcgacatggaaccgcgagctcatgcaaatgcgtggctttgctctgggaaaggaggcgcggctgaaaggcgtgaatataattctcggtccatctatgggaccgattggtatgatgcctgccggtggtcgtaactgggaggcattcggttcagatccagttttgcaaggcgtggctgcggcggagaccatccgcggtatccagcggaacggggtcatggccacggcgaaacacttcattggaaatgaacaagaacacttccgtcagtcatttgagtggggtactccaactgcgctctcatcgaatatcgatgatcgcgcattacacgaagtctttgcctggcccttcgctgagagtgtgcgtgcggatgtggcgagcgtcatgtgctcctaccaaatggtcaacaacagctatgcttgcgaaaatagtaaactcatcaacggtcttctgaaagatgagctcggattccagggattcgtgcagtcggactggctggctcagcgttcaggcgtgcacagcgctattggaggcctggatatgagcatgcccggtgatggccttcattgggccgacggtgtcgcgctctggggaagtgaactgactcgcgcagcgttgaacacgtctgttcccattgagcgcctgaatgatatggtcactcgcatcgtggccgcctggtaccatctcagacaggactcatgggaaccccctgcacctgagggcgacggcgggccgaacttctcgtcctggactcaggagcgaatcgggcacttgcatgaaggctcaccggataatgatgcgacgggtgtggtcaacaaatttgtcgacgcacagggaacaggcgaggacgctcattctgttgttgctcgtcatgtcgctgccgaaggcaccgtgcttctgaaaaatattaataatacccttccactcttgcgggcacagtccgcaaccaatggcaaataccgggtcggtgtatacggcgaagacgctggtcctggccaaggaccgaatgcttgtgctgacagaggatgtaaccaagggaccttgggctctggttggggtagtggggctgtggaattcccatacttgatcagtccatgggaagcactgcaacatgcgtggtcgaatgactctgtcgatgtcaaagcttatttgacgaataatgttgcacctcaggacctcgcaaagcaggacctctgtttggtctttgccaacgcagacggaggagaagggttcatccgcagtgacggcattgatgctgatcgaaaggatctctttctacaaaagaacggcactcagttggtagagggggtggccaagcactgcggcggtggccaaggtaaaaccgtcgttatagtacactccattggccccgttgtgatggagtcttggattgaccttcccggtgtccacgctgtactgtatgccaacctacctgggcaagaaagcgggaatgcgttgatggacgttctatttggagacgtcgacgccagtgggcgtctgccatacaccatcggacgaagcctagaggactacggtccaggcgcacaagttctgtatgagcatgcagacccatccgttccacaggtcgacctcagccagggcctgtatatcgattaccggtatttcgacaagttcaacatcactccccggttcgaattcggcttcggtctgtcatacacaaccttcgactactctgcactgagcatcgagaagctgcagaagaagtcccaatggccttccaaacggcccacaaacgaagtcgaacctcccacatacgacaaaaaacaggaggacgccagcagcattttattcccgccaggtttccgtgtactccggaaatacatctacccctacctcaccagcctagaaggaaccgaacccggtccatacccataccccgaaggatacaacaaacaccaaaatccatccgccgcaggcggcggaccgggcgggaatccatctctctacgagcccatcctcgagctcaccgtcgaggtgacaaacaccggcacgcgcccgggacaggatgtggtccaggtgtatgtttctttccccgaagatgtcgccgagcaccgtggactaggatggtcccgtgagtcaattgagttccctgaacgtgtcctgcggaatttttcgaaaatcctcctgcaaccgggtgagactagaaatgtcaagatgacgttgactcggaaggatctcagctattggagtgttcgtgcacagaactgggtgttgcctactgaagggaaattccgcatctgggctgggcgtagttctagagatttaccgctcgtggttgagttttgatccaggacttggaatactgttataattataaaattgactcgatctaatttcccaaatgtgtctacgtggctacaagaagccgaacttgaaataaacggaccatagtatatgtctatcgtactgaacagggccatgaaaagccagagcgaaacaaaatcaaataacgtataaacttttgctttgacatggtagatgcactgagttaggtatctatccgaaacatgtacatactggcggaaatggcaataacaaaatctatgccggtaaaaaaagaaaagagaacagaacgcagaacgccgaaacaccgtctatgagatccaatgcagaccaaaacattatcatggtgctcatgatgcgaggacatctcagcgattacgaatcataatgttaaagcacgtagaagcacgtctattcgtcgtcggagtcctcgggcttgggagtacccttgggggagttcaactagaaaatgggttagcatactgtggaagaaaagaaatcaacatgaataaggaaactcacccattcgatgtagcgcagacgacgacggatctcacgctccttctgctgagcacgggtcatcttcttcttcttcttagcgcggaacttgaggtcgccttcatcgccagagttgacggcagatggggcggcggatggggcggcactggtaacggcggagccagtggcgggggttccagggccggaaggcgagttggcggcactgtcctcgaagcggtcgaggctgacggcgttgttggtgcggctgacaacgcgaccgtcggcgatgtgcagttgctcggggcagagagcgcccacaaactcttcgttgtgagaaatcataacgacaccacccttgaagtcacggatggcaacggctagaccaccgagcgagtcacgatccaagaagttagtcggctcgtccaggaccagcaaatgggggttgttccacatggcaccggcaagcacgaccttgaccttctgaccaccggaaagaccggagatctcgttgtggttggcgatctcggggtccataccaatgtcctcgaagtgcttggtgatggtcttggggtccagaacacggaagcccagaccttcacgggaagcctcgtgatcgtcgaactcctgaatcaacttgaagaaaccaagctcgagcagggtctcacgcgagatcatggtgttgtacttggggagaaggccaacccacttgacctcatattggaaggacttcttccacttctgacgaccaatcaaggtttcgatgcgacgggcaccgcggccgtcacccaggtcaactggcttctccagctggatcttgtcctcttcggtaagaatacgggtctgcttcatgaacacttcacgatcgtcaccgttggcgtaacgccactggaggtactggctgggagtcttctccaaatgcatctcaacgtgctccagagcgtgctgcttgatgtaaccgatacgcaagttggggtgcttctccacctttccgccttgaggaatggtctcaccagtcagaatcttgatgaaagtagacttgccggcaccgtttccaccaatgatagcgacacgggaggagagggtaagggacagcgaggcatcgtggagcgaggggcgggcagcgccagggtaggtgtatgagacgttgctcatgcgcataatggcacgagttgcggacttgataccagacaagatgcctgggggagggaacttgaactgcacattggatgcggacagagtgtagtaactcttgccctcgggcttctgcttgacgaattcggcaaggttacccttgtagcagacgagcttcttgccctcgtagtggtagatatccgtgcagacagcatcgaggaagccggagtcgtgactgacgatcaaactggtgatctcggtgtgcgatttgaggtactcctggagccacttgacgtttgccacatccaagtgattagtaggttcgtcgagcaagagcacatcagccttctggagcatagcacgggccaaagccaacttcatcttccaaccaccggacagagagcccacgggctgggactggcggccctcggggccatcggtgaatccgaactcgaggagaacctcgcgaatgtggtccataccctgggaaacaatcttggggtccttggcaacatactcaaggatggtcaggttggcatcttcaccctggttgtgctccacgaagcaagtgcgaacctcatcctggggcgggaagccttccaacttctcgttggcgatactgcgcatcagagtagactttccggcaccgttgcgaccgcaaagaccgtatcggtggcccttgaggagacgcaggttggtgtgggacagcaggagcatacctccgtaagcaagagagaagttggcgttgacaatctcaacatcgttggggtcatctgggatgggcttgccgaacttgatctcatcctctgcgatgtagtgggcttgaacagcagcggcgacagcctccgcgttaccatccgcaagcagaccgcgcaggtatgggctaatgcggtcggagatacggtcgtgcatgcggcagttgacatcttcgcggaccatgccggcaatgaagttcttggccagatcctgcagcttggagtctaaaccaaccagaccaccatgctcctgaatcttggcattcagcacgaccaggacctcctcgggggtgatcttggagatggaaccagaggcaagatggttgtctcccatggcagtctcgataacgtcgagagcacgggtggcgagctcgcgaacctcgggcagggaggcagtctccttgaccgacttcacaccaggctggagcttggggaggaaagtacgggcctcagcgggatcgtggaccagcttggtcagattctccacaacgaccacggtctggcgaagggtttcttggggagtagcaggggtattgagggatcgagcgagcagaggagtcaacatggccaacacgggagatgtgacgatggcgacgaaggtggtctgagacaaagcgtggatggccttttgaagagtctgggcggaggggttctccatggtcttgatcagaaggggaatacggggggcgacatcgtcgttcgacaggagggtggtgagagcagtcatggtcttgcaagactgcttggtcacttcactcttcaggtcgtgcatgccggactcgacaatggggatgagctccttcagggtcttgcccatagcctcacgcagcaagtccttctggcgctcctcgtccttggtacccttgcccaactgcgccttgacggccatcttttcgatcagcgagtaggcacccacaaagccttgccacttgccagatcccttggccaggtagcgctcgagagcggggatcagaccgttgaccatggcctcggggctgagacagccgaagagggcatcaatggcgtactgggcagcatcacggacgacggcacccttgtcagaaagggcatccagagcaaggtcgaagacgcctccgtcgtgcaagaggaaaacggcttcactgagaggaaattctcgggggaagcgctcgaacaaagcaccgatgatgagcatggcacattcgcgcttggtaggattcttcttatcggaagcagccttgcgaacatcggcgagaacattgtagttcagcaggccggctgtgccggcgccctgaataagcaggttggtcaaggcatatgcgccatccaaagacttctgggaggtgtcggaagtgaagatggtgttgaggactgaggaaatctcctcggaggtggggggcacgccggaggggccctttgcaacgacagtcggcatggcgggagtctcagatggtgagacagtatgcggcattttccagagaaacagaaagtcgaagatcgagtgtcggtatcaaagaaagataccgaaaaaaaaaaaaaaaattgaagcccttgggtagagaggggcaattcgaccttacggaagataagactgttcacagcgcaactcacgcacacaaacagaggagtaggatcgggttgaatcgtagagtatgtacacacgattctgaagaaaccctgaagacccgaaacacaacgaaaaaagaaacacaaagaggggagagtggtctaaagaagtaaaaacaatcttcgccatcgccgattgctgacccacgggcgaccgaaatttttttttgcttactcatccaatcagcgggtccggcggtgccatgggacaaaaggcgcctaaccggatttgtctgattgggtcagtgacatgtctgccttggtgcctggaactcctgatgccttactgcctgaatatcgttctgccttgttgccttattcctgaaattgagctatgcctgaggcgttacgtcacagcaatcagaagtaccaacgtgaaccgacgcttctgacggataaatggatgttctttttcactctggcgagccccgaggctcatctcgtaaggatattggcggcattgggttcgactcggtccgaggccagccttctccaagtatgtcagtagctatcgtatacaatgcatgtcaatgaaagatatcacgatttataccactactctgtagactatccaggtagactgaattacgaaatagccctgtgttcactgagatgcgtcatatccgtccatttcatcatccccaacgttagcacagccgatatggccgcatgaccccgggcctcggtagacacaaccccttgttccccgcgtccaaccggtctgcattcggtcaaggcgatctctgagttcggctgtttatttctcctctttttgtacatttatcctcgtcaatcccccgagtttgacttcaattgctgtttctccctattcccgcaattcatctccgcccccgcaaatccacccccggaccccatcaccacaccacacaaaatggctctcagctggagatcaacccggcatgtttcaaggcttgcacaggtgagtttggatgataatgattacttgtaattagacatttcgggctcgctaacttttcttttaagtcagcacgacctgtcctctcggcacgtcactatgcgaccgccgagcccgacctgaagactaccttgaaggaggtcatcccggctaagcgggagcttctcaagcaggtcaaggcacagagtgaggaagtcatcggcgaggtaaagttcgcaaatgtcattggtggtatgcgtggtcttaaagccatcctctgggagggctccgtccttgacgctgatgagggaatccgcttccacggcaagacaatcaaagactgccagaaggaacttcccaagggtacaactggcacagaaatgctacccgaggctatgttctggctgttgctcacgggccaggtgccctccaccggacaggttcgtgccttctcgcgcgagctcgccgagaagtccgaactcccctcatatatcctagacctgatcaagactttcccctcctcaatgcaccctatgacccagctgtcaattgctgtggcagccctcaataacgaatccaagttcgccaaggcctacgcggatggcatcaataaggccgactactgggagcctacctttgacgacagcatctcccttcttgctaagattcctcgcgtggccgccattatcttccgtcccaatgacatcgatgccgttggtacccagaagcttgacgttactcaggattgggcacacaatttcgcagagctgctgggcaagggtggctcagaccatgctgacttccacgacctactccgtctttatcttgctctgcacggtgaccacgaaggtggtaacgtgtcagcccacgcgactcacctcgttggaagcgccctgagcgatcctttcctgagctacagtgctggtctcttgggcctggctggcccactccacggcctggcagcccaagaagttctccgctgggtaactgccatgcaggataagatcggaaccaagttcacagatgaggatgtccgcaactatctctgggatactctcaagtcgggacgtgtggtccctggatatggtcacggagttctgcgcaagcccgaccctcgtttccaggctctgatggacttcgccgccacccgccctgatgttctcgccaacccggtattccagttggttaagaagaactcggagatcgctccgggtgtgctcactgagcacggaaaggtatgtccaacagcagacatcatcaaaatatctttctcagctaatgatttttacttttctacagaccaagaacccataccccaacgtcgatgccgccagcggtgtccttttccaccactttggtttccaacagcccctatactacaccgtcgctttcggtgtcagccgtgccctcggccctctatcccagctgatctgggatcgcgttcttggcatgcccattgagcgccctaagagcatcaacctctcgggcctgctcagcaagaaataaataccaatatgttgcctggtgcgacctaaaactccttggcctcgacggttcaaatgatgaatgtgaagcgagctttcctgatttttcattttcgttcggtcgctttcgttttctcttatgtatttcatccgactagacagaattacctctatagaatgcttgtttttctgatcaattggatctcaattttgagcaaaagaagtacttgagattatggagagtaatgtaaaccggatgggaagatcgtcatgaagataatgtaagacatgcaaggcagccgtttgtgattgactttcgagagatggccatattccctgtagccttggaccagtctccacagactgtgtgttggcggtcgtaaggagctcggcctgcatatggatcggaagaagaccgagagccgaggagtatcaagttgcaatttaggaaactcgcttgattgaataaacaatgtcaatataacgaacagaatgctgatatatgcattatctccatgtctagctaagataaaatagaactggtcgtcttaaaaacgcaaagcaaatatgtaatcctatccagaatctgcatctgcctcggctcacaaacgaatactcccagtcgacaattgctcccactctctctgtccatacggcgaatagctcttatcaccaggtgcaatccacaagaagtggtcatccttaccctcgggggctttagttccaagcaaagcaataccaacactctcatcccgaagcggtaccttgttctgcttatgattgtggatgtgcgtgggattctcgacgatgcgaaggaacaacggaatagcatatttaggcagcttggagcgtacgaatctcggaagcgctgtgttgtcaaatgtctgtcgggcgtccgggctaatctgaatagctgcacacccagcccgtccttcgtaattgggaagacggacgccgtagacgttcgcctcggtaataccagggaagtggcctaggacctctgaaacttccgcggttgctctagtccatgaatgctttgattagctttgcttgtattccctcaggtgatttcaactcacacgttctcgctcttccagcggaaggtatccccaagtcggtcgaggaagtaccaacggccatcactctgccgacgcagagcatctccagatcgataatagagatccccttcttgaaggcgtcgcgcaggaatttcttattggtcgcctcgtcattgcgccagtacccctggaaagccttttcaccaggaacattgacgataatctcaccccctgctcataaggcgcgcgaagcgcaaagccagtattagaatcgcgcagaatatccccagtctctgggtcaatagcaacaggaacgaagacattatacagtataccccgcatgatcaaaccgtggtgaccaaaaattccagacgtgaaaggaccgcttaaagaactccccgacttcagcgactctaaaccgctcccggatatccggccgcagaccgttgccgtacatacagcggaccttgtggtttcggtcctggggtgatgggggcggcacgagcaggtaatgcgctgtctctctgacatagatgaaaatagtcgactccaagtcgcgggcatcggtccagaatctactcacgctgaacttgggtgcgatggcgacgctcacgcccattactagacatgcgattacggcgacggctgctgtgctgtggtacaaaggcatgcagctgtatcagcgatcgccgtctgggccgggcgtgtctcccatcagggcacgtcggatgaagagagtggtatatagtctggacattgtgaacgcacagcccttgggcatacccgtggtgccggaggtgtgtaggaggatcgctgggaagtcgctggtcacatgtttgctcagttccttgggtgggagggttattgggaaagtgttgatatgcgcctttagcgagctgtccagggtcatcgacttcattcccagattgtgtgtaatagcgtcgttgctttcatcgacgcgggcacgacagtcggcatcttcgtcgacgagcagaatattcgcgccactgatcttcagacagtgcagcaatgcgtcgccagtgagattgtaattgatcgcggccggggcacagccaatgctccagaggccgatccatgcgaaaatgtactcgttgctgttctggaggtaaagggcaacgaggtcacctttcttcacgccctgtgataagaagaaatgggcgtattggcaggcttggtcttggatttctcggtaggtgtatggtctctcgcgagtccagacacagtccatgccggggtattacttcacagtctgcagtaggacgaaccatggatttccttggttttgacgaactaaagctgatcagtatggtttacaattgtcggatagtatgtgaacataccggcattggcatattgtcgttcagcgtgcttcatcgtgaccaaatttgatacatccttctgaatatgaaatttggcattcagatatcctgcgactgtggctcctcccacgagagcagcggtggtacaacatgagcatagcattatgatagaccatctcgtaccactcgatggtcaaaattcttgctcttcccagacctcctcagcaatcatcctcaacatagcgccgctaaggctgatgtcagtttcttttgggatgctcggcgggcgaagaaagagcttttcgaagctgataataagcggctggccactgaggtagacacgattgttctcgcctttgctgattgtaacgatttgctgacgtttgaccatatcgttcacaagttcccataactctagcacgatgttgggcgagctccgactgatcttaattgtaatgaccatttgaacatcgccgttggattgggaaaaccagaaccgagcatctgacatcaatttgctgggcgactctgaaaagcccgtttctatgacaagcgagggccatttcttcgtccgagctcgaggaagtctttttggtaaaaattgacagtctggctgtttagcagagccattctctgctttgcaagtagcggctccaaagcttcgaagactataatcgagttccattggcttgaggcaatcaaagaagagcctttcaaataagtgtgccgtaacttcatgagcgcgtgagactgccattttgacaaggagaaggtgttgggaagagtcgtaagaattccagcaacgctgaaggatactatcgtccgagtttaggaagtcgcgactgaaggcctgcttattaaccttggtgaagagcacccattcactggcctcaaattcctcttgttggcgatttagttccatctttacagtttctagaaattgtttagttcccttgtacggataccttctgatcgggggtcctagatcaccgagaaagctgctgctagagctctcggtgtctagctcaaactttgtgttcgaggacatgatagccgcaataataccgtcccgtgttagtgtgaaagaagaaacattcccatattgactgtaggcattaagaatcgtccccgaggaccacctgacgctaatgtgacgtagccttattacgaccttcagcgcaatagacatatacgtgcagggccaatagaactattcttccccaaagttagcggttagtcttagtcttggagaatgaagtttaaagaggctgaatatagacatgatatggaaaagatcttgagaaaaaaaagtcccaggatggcattccgattgccgataattgtccgaattggtgacttgctcacgatttactgatcacagggatatcatgctactgaaaatatcgagattatgccggaatatattcaaacagattataatatctcagtagacatatctgatctggccttgggccaaccgccggttcatccacccgtaatacagtctcaaagaaacacatacggaacaagcaagcagcaggagcgctgcgttggtccagtggccagtagggaagcctttcttggcttgattggacttgtagatccagacacctacgatttgaccaggcgctccgaaggaaatattcatcgcaatggccaaaccaattccagccgttgagcggagattggaagacagccagcccagaagaggaggaatgcatgagaatgcacccgaggtagcgacaatcaagcatccatagcggtgctggtgagctgatgttaacatatattcgtttacagtgttgtgcgtagatcagaaattgctcaccagataagcgtctgcaggaaggacagcggaagctaagaaacccatagcaccaataaatgagaagatagcagaatgcataccgcgactgtatcttgattagcgatgccaattgattgggggcctgaagagggggaacgaacgcattgaagtagtctgcagaccaggagaccgcaagagttactacatatgcaacggcttatggaggaaccgtcatcaactgagcctgtagattttcataacccaaaccggcggtgatggttggtgtgaaaagtgacagactagaaaatggcacggaaatggaaaagtatacctaaaaatatcagtcaacgaatgaatccaacggtttcccccgaagacaccttatacataccagataatgggcataaagtcgccattctgtcaacactgccttggcttcactccaggtcattgctttggccgcaccctggcctccttccacggcgagtcgctgtttagccagtgccttgtcctccgcagttaagaaaccacaagtctctgggtaatctggaagaaagaaccaaacaaggattgcagatgcgcacgaaggcgcgccttcaatgataaagagccatctccaggcggaaagaccccttacaccattcatatgcccgactccgtatgcaatggctcctccaaacgcgcctgccaaggtggcagaagccaagataaacgcgactctcaatgatcgttccgacactttataccaaaatgtgaggtaaaatactagtccagggaataggccagcttcaagcaccccgaggagaaaacgaactcctgcgacttgtgcgaaattctgggcacctccaaggcccatggtgactgcgccccaggagaacatgaggaacgcaatccagcgctataatttgcaattagcttaagttggtaaaccacatgggacggttactaacacttggtttcaatttcttgaggaaatagttggaagggacttcaaagagaccgtaggcgatcaagaacaccattagagcgatgctagtttaagtcagaagtgccgcgaagtatgggaagtcgcattgcctcacatgtattggtggtctgtcatattcgtttcgtcgagcaaatcattgcctgtgcctgagttgagagtcttcgcattgcctgttttgatcgacttgtcagtactggcgctggctaattggcatactgaatccaaacataccaacattggaacggtcaaggtaacaaagtagataaattccagcgcataggggtagaattcgaagatcttgcttgcgaatgagggacttttcttgctcgaagtcgacctcgatcgccggggaaggacttccattctacagttatgattagttaagatacagatatcaggggtaaggatgtagtgtataccttcatccctatctccacatcttccaccatatctgctggactcttgtggttctgcattaggggtatcgaggttagggacggagaagtgcagcaatctggggtagctaaaatccggggaaagcagtttcaagatatacacaattccccaaccgtgccccatagtttaatttttcggggtaggaggccgtctccgatggctaaacggctaattgtggccaactacggtagcctaaacgggccacatttgaaaccctcggtgatacttactgtcttcaccgctggagtttccgcctttgtaatataccgcttaatacagtccgcgtattttgaaacttagacactgaacacccacgttaagcgtcacatccagtgcagcgtcacatccagtgcagcgtcacatccagtgcagcgtcacatccagtgcggcgtgccaacagttttcccttcctgcctccgcagtagttggtggaagctcgatcaacaacgtcgatgactccaaggctccatccgcatctacgtcttacattctgagggctgtgctgccggtgtagcgaactaagcctagtaggccaacatggttctggctgggggtttcgaactcctactcactactactaattctcccccaaaatctgttcacttcaactaatgcagacttacaaggcttcattatgacttatgttatgtaaaggcacagtctggaagcaattgaatatgaccagtggattccaacatatgattacctacggagtagtaaaagtacttctatccatggatccatggatgcttaagggtacgttagtcagcccacgaatttcagaagattaatccgcgagacatgtgggattatcctcctattggttgatgcttatctggtttgattacattgctggtttactacaactgcccggaatggacatgaaccagttcccagatgtcgcaccagatcagcgggatctcatccaatatttcacctgccaagcatcggttatgatttcgtgtcacccacagatgcagcatgaagcctgcaatgtgttaatgcctttgtcatccgcaagtaacgctctgctttattctctgttggccttcgctgctggtcaccaagcctctcgtaccacagacgaagtcgaaaaacgacatttccgacgccagatgattcaactcgaaaccaaaagtgtacgtgatcttcaaggggagatttctcttcagcttcggtcaggtcttccccttatggcatctagtttgatactatgtctgtgctctctttgccatgagggtgacgactatatatcttggagagcccacctccgaggcgtaaaggcggccttttctattataagcgctacagaatttgcaggaaaagaatctcaaatcgaatacctgacaaagcgctatcagttgctagaagctattgcaatgcttacagctaaaggatttgaggcgctagagccgaaggacgaccagtaactatcctctcaagcctttttggacgatcatgtggcttgttacaatgaagtcctggatatgtttcgccatattggagctgtagctttcgaccgacgcaagcttgatgttacaccgcaaaactcgattttgtccccaagtgattttgaattggaaggccaaagtatggagtctgctttgcttcgaatgatacacagagacaataatttaccgcccagatttcttccaagggtacaagagatgcttaacgccggccaagtcggggaattcaccatctgcaaccaaatttacgaatacacggctcttcttcatgtgttgacgcagacacggggatgttttcgtttggtcttgggagttccgagactgtgacaaatcttatcagattatcttatagggcgtggaaatggaggacatagcccggggcactcgacttgcagtatttgtttgttgactcgcaagagttaattttcccgagatactcatccggatttttcttggtgaagtttttgacagcaaatcggctgaccatcatgatctcgtctcccaatccattgcgggtactatgatgtattagccacaggaatgtggaatagaaaatagaaaaaattgggcgaccataccatctttgattcttcgtagctttggatttccaagttattatagaactcttcagttccaaattccttgcgccatttcacaaaggctgcgtgtcacctaaaaatcattgagctgtaaggaaaaaccccttataactcaccgttgttgagatataagattgtaaaataaggcatttgctatggtgttatgggtggcccactcgcttgtgaaatatgtcggaggaaaaaacaccgcatgttaccactagaccaaaaaggtgcacaccttacttaggaaggataactggtgtaactagttatttctcgttctgacaaaatacgttaataggtcaggtgatcttctagttagatctaggtattctgccacctagtaccatatagatcccacggtactaacattaagattccagaactcaagccggctaggtctagatcaggattgagatgatcgtggctgtggggcttggcatggagttaagtaccgtttgccgaagatgctgacagcggagatgcttggcaaagtgtctcaatgattcgaaatgggatccctaggtaaccctggactgttctcacataacattgtgcaatattacaatttgaatgccaaataatcaagcatttcctaatccataggctttcatttatttgcctggcctcagatcactgcttctgttttcattccaagacaattcattagcgtccggacaagcccagctactttggtctgtcaaattgaacgagattctcgactaatcgacactttgcgacagacccacagatcgtcatcatccgaagggttcagcttatcttgacgttttctagaacccaaagaaagatctccattgtgactgaggaaggcagcaacaatccacgatgacctagtattgatgcaggtggctgacaggccaagatctccacagcggattgtgttcatcataccacagagtcgaactcacgataaatcctacactaggcttacaaatgcacactttgaaaggtcagcgtgcaaatttcgttctcgtttagatcagatcccaggcagccaaatatcggtcatccatgggtcttatgtgggtcttattctagccacgcgtccatgtattcgctttcttcatacttggcaaaggtcttttgcttagttctggggtgctgacacaggctcggttgaaatgctttggtcaattgatactcgttaggtatgggtctttgcttattatatcttggccacagcagagacaccacaggtgatgagatacctggcggtggggctggagattcgtacatgtcgacgttaattctatataatcctacatattactgcttacagggagattgattatactttggacaataagacgaagtataatatctaggatgaagaagccgaccttgtccttcacttttctggccttgcatgcatggtttgtgtcgatattggctgttggatgtaagtatacgatgtttctcaagtgtaagctgaacatatgtctgactgtttcttacaggtgatccagtgtcagttcattttatcgaccccgtcctctctcccttgaatgccacgaagaagttcagtatcacagctgggattgagacatgcaaccaaaccatcaacttcattctagaaaacaacgatgatctcttatcacaagacgtgcagattcggtatcctgggctccatggccaagctaacgagacaggtgcgctttcgggggctcacgttcggtttacaaaaggaacagtgtggatgcaggacccctatagtcgaagtcaggataacgtcggatgggcacggcttaccgtgatccaggaaggagatagcctgctcttcgatggagcattcacaatgatgggctcgcaatacgccatagagtttgagatgctcgatgatggatctactgcgatcgtagcccacgaacaggaatcgacactctctccgatctgctcaacttcacccgagacacacttgtgtaaacgacagagctgggatccttggagcaacgaggatctcacatcaacgatcggcagtacttacggttgtccaaatacgcgaaagattgccaacgttggcattatgacggattgcacttacactgcaggcttcaactcctccgattctgcctatcgctatatcttgaatatggtcaacactgcctctgtggtgtttgagaacagtttcaatatctctcttgctatacaaaatttgacaattagtgactctgaatgcccggacaatacctctggtacgactgcatggaatgtaccatgctctcggggagatctcaacacgcgccttcaagacttttcaacatggagaagctccgtggatgatgaaaatgcatactggaccttgttgactgggtgttcgggttctgctggagaggttggcgtgtcatgggttgcagcactgtgcaacacgggatctgggtctggtgatagtggagctaccaatgtcgttgcccgaacgcagaacgagtggcaggtctttgcgtaagccacaataccagttagccataaggtggtgaaattttagctgacaggatcagtcacgagtcggcgcatacattcggagcagtccacgactgcgattcgagcacctgtggaagtgactcgacacagtgctgccccctctcgtcgaatacctgtgatgctgatggacagtacctcatgagccccgtatctgaatctggcattacgcgcttttcgccctgcacaatcggaaacgtctgttcaaggcttggctctgggcaagttgatggacgctgcttggtggactcttataccggcaatacaactggtactaacgagcaatgcggcaacggtatcgtcgaaaccggcgagacatgcgactgtggaaatggtgcctgtagcgaacaagagtctcgctgctgcgactctgtgacatgccagttgcgatcaggagatggatgtgatcagacaaataatggcggttctggtaatactgccaacactgataacaatggcaacactgggggcaggatctcgggaaatggccaaccaagtaacgatgtatcatcctgggttcaaaatcatcttccgttggttattgggctttctgctggtattggtggggctttattgctgcttatacttggatgcttgattttttcctgtaggcgcagccgcaggcgaccagtggtgaataacaagcctgttgcaatgcctccacctcaatattcttagaaatgaattgttgtcaataacagaggtcatagccgtgatataatctttcggagcaagcttagcaagagatgaaattctgatcatatatatttccagcttttaggaacttaatttttggtaatttttgaaatgatatgaacaactctataacgagagatcagcgatggctacctttagctgtctgtttcacccacaataacgggccgcctggaaaccaatatgtaccggacgacatcataattagatacaaaattggtagatcgtaactatgatttatatggcccacgttattgctgatgggttctttcctccgcgttttgatccatcattagggcaacggaaacgcacgactagtcggtaagcgagtcgccatcctccccgaaacgcgtccatgaattagcacttggtcaattcaaccacccatcatgccaccaattcactcccaaaccccaagaaattcagctgagcaggagggtaggatcttactggctgtctgggctatttaaaaacacgaaatagctacgatcacccttggtgctcgcatatttgatgtgcctcgatccactttactacgatggctctcgtgataaatagggatccgcaagataggccatctaaacctgaccataaaagcctagcagagctcttaattggcatgaatttgatgctgaccatgagggcaggacttgatggctttcagcatagaaggtcagcatgccgcagcgagaagtaaggactaaacttaccgcaatactattgaacatcggcacgacatacatgaggcatttaccatcgggaagccttattcggttgatatacttgcctatgggaacgattttctctatcaccaaggatacatctgcgccctcttcgatcataggtgtgacagctcaactcgccggttgtgtgggatattcgtcaggatatcaaacaacttcttcttcttcattatcaatcaacacggaatcaaagcatgatggtagcacctcagaacatggaaagacactggctaagaatatcatcgggtaagtgcaaatcagtatcttctatacctacagtttccttctatccatactgaccacatcagcagactccataaaccaagacttccttgcatattgagatggaaatgactttacactggtaaatttataacttcgtcttcagaaaaaaccatttccttcgccaaagttgaaccgtacctctgtagccccatataaatcggaccaaggagtagtacaattaatccctgcgtgacaaaacaccaagtatagcctggaatatttgtgagccaacgaatgcatgcaatgtgatagtgggatatatttaccgacggcttcaacccaataattaatgaaccatggctcgacaaaggcagaaaactgtcgctgttagtactggagtgctccttgtcacagattgcaaattaacatacgttcaatacgacggcgtagaatgtcataatctcggtaatatgttccgggtagcaatcgaaaatgtaggtcgagacggcgcaatttccaatttgcattccagcagagactaagtaaagtaaatatcagtcatcgtttcaatacacattgtccgctatattctcacatagaaagaaagcgacttggcctgtgatccagtgccattggcgatcgattgaaaggccccaaataattgttcctaccgatgcaaggaccacacccggatacatcaggtagagtcgcatttcgggagttcggatgttgttatttgctgtcgccaagcgggagcaaatcatgtcgctaagcctaccggaagtcaagagctcggctgcaattgttccaactataagaccagagaaaagaagtccctggatttcaggctgataactggagtatgcggcaggcaccatggtcatgaaggacaagaccctattcaggcgtaagtatggactcaaggtgtctaaatgccatctatcttaccaccagtacaggcagaaaacataaggcaaaacgccgaggaccagcctgggatgcgaccacatcttgcaaaatcttatgattccttgttctgggcggggatgagctacaccgggaatttcgatcgcattctggtttgggttagattatgatgcatgagggaatttgggccctacttacccaaggtttgatcatcttcgttcggttgatatcggcaaatgattgctcatttctgattcggtccaaaatcagatcgcgaggaaacagcgtttctggcaggaaaaagacttccagaattagcaagacgccataggcaattataacatggtaaccagcccagtattggttggctaaagctgtaaagcctccaactagaccgaattgttagcagtatttcacaaagctacgttgtcaagcgccataatcgcgggacatacctaggcagcccatagtacctccgatatcaagtcccataacccagaggccaatcataaacccacgctcgtgctcaaacgaaatgtcgcggatgatacttagcccaccgacaatggacggaccagcaccgatgccctgtataaggcgagtgaccatgtatcctccaagtcctatagatctgattgttgtacaacctgtcgcaagaattgtgagggcgcatgtaccgatgaggatgggccggcgaccccagcgatcacccagggcggagaacaagagcggaccgatcatcaagcctaaggagggaatggcgattgtccaattgaccatagagtaggaagcattgaattgctcttcaagtaaagagaacgatgcgataggtgttccggtcatatacacggatagaaatcccgaataacatgctataaacaaaataaggctcttctgtgatttagaccagttcagtgggtctagggggtctgtcgtcggcgaaggtgataatggaataccgtaagggtcgagctgtagtatatcggtatccagctcatcggtgtgagctggggaagtggaaagacgaggagactttttctgctcatccaagggaggcgcgtccgtcatgtgttgactcattatgagaatgttagagatttatgaacaggcaaagagcagaaaattagagcgatgaacaatcattcatgctgcctcatagtcctaggagatataatggcttttgttttttcgctaattcactgacgtatgttgtacttcgatccaggggcttggatacacgcagtgatacagataagagcttatcttgtacttatttcgctgatatcgttcttgttacgagatgagaacagaaagaatagaacagaatcccatttctcaaatgaagagagactcgatatctttgatcgtctgtatattgtagttgactcgcccaatgtacgttcatctccaatgccttccccttttggattgccaagcataattccacgggatatgattgggtggaacaacagcgcacagaccctatttagtcagcgcttagtgacttcatacaacgttgtagatagcgcatatcgcgcagggacgtatccctctattcatgcatattagcaatttttcagttcaactgcgtgtcggatgtgcttccctttttagtgtggttaggatctgcacttagacctcgacacctagaacagtgggaggacttgatatcctcaaaagcttttgcggccccttctattctcttggattgtagaacattttctaacagcagcatctagaagatgactatcttcacaggttttatagtggaacccatttctttcaatacatttctatacaagtcattgggatgtatctccatgatcatccttatgggttggctactatatcgtctgatgttttcatcgttgagcaagattccagggccatggtataccaatctgagtgttctttttctggtataccatgagtacaggggctcgaaacgactttggattcacaacttgcacttgaaatacggggaatctgtacgcatagctccaaatgaactatctttcgccagcgcgaccgcgataaaagagatttatacatctgcaggtggctacgccaagactgagttatactctctttttcaacatgggcctcacaggaatcttttcacggccctcgataagaaagaagtcggtaaagcacttggagattgagaagaatatatatcgttaactccgctacagcacaacgagaaaaaaaagagactagcggatcggtactcaaactcagcagtccttcagccagggatacaggcgctcctgcgtgatcgagcagacgcatttgccagggtttgcgccgtcaagaaaactttggatgtctatgtatgttcgtgtcagtcttttctcaatttatgtccatagactgatctatcattacagttatatctacattgctacgccctagattgtgtcagtgctattgtttttgatccatatggcacgaggtctatcgaagaaggcaatgacaacgatatggttcgtcatctctcgtatcataacagccgccctggtacgtatatcgtggagattgtaaaatgatccagcacacttattatattaaaggtttggtaatcaggcattatctaccctggttgcatcgcttctacagccgatttgatacacggactcagaagggtggtgaaatgatcgacgaatatgcttgggcatccattcgaaaagaacctcattcggtcttcaccctttccacacgactactccagtaccctgagatagggacgggaaacatggtggccgaatgcctagatcatatcggtgcgggtattgacacaactggcgacgcactatgtttcctaatgtgggaaatatctcaaccccacaatagcaaaaagatgcaacgcctgtgcgaagagttgcgaatgtacagcctagaaaatggagatacactcatcgacctaccctacctaaatgctatagttcaagagacaatgagactttgggctccaggaacacagtctctgcctcggtacgtgcctgatggtggccgctgcattgacggtcactttgttccaggccatacaattgtcagcgctcagtcatttacagtccaccgaatggaccagacgatctttcccgattcggaagctttcaaccccgagcgctggcttgagatcgaagggaaagttgagaggcaacgtttgatgtttgcgttcggttccggtgccagaacatgtcttggtaaattgtgtgtctttgtgcagtattttaattgatattgatcttgactttttgctaacctactcatagtctcgcaatgtcagaaatgagacttcttctgcatgctgtctattcaagattccgtacccgacctgcggatgacatgaacgcatcgatggaaatgtcggatcagttgatgacatcgcggccaaaggacatgctatgcaaacttacctttgagcccattgagctttgaaagttgtggtttctctttattattactgcttcatccatctgtcatgttatctagataaggttatgcgaataaatttcactggtattgtattgttccatccgcggcgtgctcggattctgcacggcagaaatcgtattgtcaaattgccccattttgccgtacaccggggttgactgcgacatacggcagtctttaaatgccagtgcgagattttgcctgcagtatacatgtattttctagcataagtagtttgtacatctgaatacatcaagtgttaatttaaaggtcgtgtataatcagggtgcaatgaaaagccggcaaccttgtgagccaggcggttaaggttccctaagggactgccgatagagactgccgtactccgtcgggtcttcgcatccgccctccgatactattttccccctttaccccaacagaaaaaaattagagaatatgcaagcgtgcgatagatgtcggaggcgaaaatccggatgtgacaaagtccacccatcctgtggggtatgcagcaaagcgggtgtggcctgtgtatacaccgacagaacgaaagagcctccgatccgacgagatgtaatcgaaaggcttgaacgccgattacgccaaacagaagcgacaaatcgagcattgacagcgagattggccgctttcaattcgacttcaaacaatcagaatactccttctacgactaagagccctcaagcggaagaaagccgacacgaggtctccgatgaagtttcattcttatctctgaatgctgggggtgagcggcggtttctgggatccacgagcggtgttccttttgcagatttgataatatccgccattaaagctgatgcctcatctaatgcgcagctgaatgctcagggatccgggtctacgtcggcatctggggcgtccaccagggctgtacagttgtcgacttcaatcagagaaggaccaccagctctgccggagagtgcagctcgcgacctccatcgcgcatactttgaacatgatcacctatgctttccaattctctgccagcaatcggcaatggataatctaagaaaagtctatgcggaaccgtctacatttgaacggaaaccttacgagacattttgcttctatatgattctagctatttcagcttcgaatgttcaaaagcttcattggcagtcattgcccgaagcggaaacataccatgcacaagccatgtccagattgaacgatatcctagctttggggggcatcgtagcgctacaggcgatcctactcctctgtcaatatcaattgacaaactccacgcaaagaacatctggaagtctatggcacatggttgggatggcggcgcgaatgtgttttgagatgggccttcaccgggaagaggcgtataattatcgaaactctacaccagcctccactttaacgatgcatcctcggtggctttggtgtgtattggcaatggatcggtgagttcactgtgaacagttactgaagatgtgactctaacttttctttcgcgctcagcgtagtcagtattacgctaggtcgaccattcgcgatacacctagaagacgtggacctccaacttccagattacggaatcacacaacctttgagcacaacagaagggcatgagatacggccaacgggggagcagtaccgagaagcggtcttcgctcatataatccggtaccgtattctttgtggcagaatcatgtcatctctgcaccgaggccgatacaccaataacgaacattccgccttggctgcacaagccgagcttgccaatgacctggaagaatggcacgccaagacgagcgcattacaccttgaaagtggtgcctcagacggggccaaggtctccagtttcctgaccgttgagtggtacgagatgatctatcacaatgctctgctcatgttgtaccggccttctccagcgctcccattgaactcgtccagagcaaccgtggcagtgccaatcatatatgagtcggcaaaaaaggcgatcggtttctacgcacatcttcatgaattacagcgcatcaactatacctggattacgttgcacggtgtcttcatggctggtctttcctttgtttatgctgctggacagcatttccgcaccaagaagaaccagcgtcatggccagggatcacccatgctaagctccgatccgtcaattctggaaattgtcaacatctgccgctcttgctctagtgtcttggtggcggtatcagaacgtggggatatcgctcgtcattgccatcgtgtgttcgatcggctgagcgatgctgtgttatcagatgcggtcgaatatcacacagcacctcgacttggcggcttgccgcaaccggtccctcccacccctcctgcgttgtgcaacagtgtccctccaaatatcgccgcctcaaattacacaattgatacattgccatccgagggctggtctttccaggatccaatgctatcgtctctgcttgcggtcgatgatgtttttcgggattgttttgacgatctacagcatttccacgagtctgcgttcggtgaagaccccattggtcaactttcacaagattggttagggcagatcggtggttcgcaactacctgaaaccgacacatgagacgagtaagaaagttataagacatgttacatgatatttcaattgtacaaagctctagttaaatacatcctctctctaaaaattgtaccgggatgggaacaaccttacttctcaagtattccccaatccccttccctaagccgtcgatcctgctggagctcgcaatacccccgtccaagaagtctagtacccggaaatgaacggcgaaaatattggggaactcacacctttccacccttctatcggcatgattctcgcccttcgtccagtcatctccgaataggcttttgatccgggaaaccgtcaggaatgactgcagccaaggatattcgtcctgatttctgacgaagaaaccaatattggagttgtctgccttgtctccggatcgggcgtggacaatgtggcccaagggagctagttgcgtaggcccaaagctcgccaaatcgactgcatttgcagtctcgtaggaatctctgatatcggggtacttggaggttatcttcgggggctcaatcaaaatcgggctggaaacggtgcttcccaaaacatgtgtttggtggtcaagagacgccatcgagatgatgactgggaatatttccatgaacggctttgggtccatggtccggaagtcgagattcatatgatatccagggtagctctgcattcgtagcgcgtatattgggatcttgaacttctccgcacagatatcttccttctttttagcctgcgcgaaaacacgtaggaagaccgtgccagcctgctggctactgggatttgatgcaggggttccatatagctcgattgagaacttgctaaatttgtggtctcggaagatgtgcaggagctggttgcgcatcatctcgactttctccgagacgtcgagcccgttgatgtagaatgtagcctcggcctggtatccgcccttggctgcaatcattgccttggtcgttgccggtgggggagatccggtgataccatgtacgtgtacccgattcggggcgacctgctccatggtcacattgtggaggttggcaaccacgtccgggtttaggtactgttctccctggagttcgtacaggaattgagcgatggtgttgtgttttgtcacggctccggcatgtgcctcgggctttgtgatggtgcaacttccttcgctagtgatctccgcgataggaaatgcgaggtccaccagctcagggaggatagatttgaatccagagaagttggcacctgtcacatatggcccgcactcgatcaaatctatacttagttagtcaatttagccaattattcgctatacgaagaatactcacggcccgcaactaagccacctgcaagtcgatcccaatcatctcgagcccaattgtgccaccatgcggcagctccaatcactggtgatgcatccgtgactcgaccgcaaataatgatatcagcccccgctttgattccttcgacgataccccagcctccaatatacgccactccacagtatggctccaattgccagtccttgagtgcccaatctggatggtcgagatgcaagaggttctggcacttagcaggatcggttacagtctgggagatatcatcccccaaaaccatggcaatcaccacatccttgtggccccgcgcacgacacatctcctgcacctgcgcagccagagcctgtgtatttaaagcacccgcattagtaatgaccttgatccctttctccacgattagatcaatggattcagataattgcgtcaaaaagcccgcttcgtagcctaacgatggatcttggtctttggcaatggcgttccaggcaatgttcatctctgaaagccagtcaccgacaattacatcgacgttgccatcttgcgccatgcgccgcatggcgtgcgggctgtcgccggttgcgccggagacatttccgatgcggatatcgcgtttagggggcatactttttggattggatatgctgaaaattaaaataagagactcgcatcgatcgatctcaaggtatttgcctttctttaaagatcattgaacgatcgggctttatcggctcaatcgggttagcgctaatgtgcatcggaacccagtccgatgtttcggaggtcttggcccgacaggggagactaacacacagatttggagaagggagttggagattgttcaatatctgtttttattcggcctgatcaaaatgaagcgctctgtgctgggtcaattgccgatatctgtggcatatgaaagtgatgtagttatttccaagatcacacgcagcgcttgtttgagaacccatctattaatcatttaccagcaccatataagctagctgaaggatacttgtccttgaaaagactcccaaatgccaatcaatactgcagggctacacaaaggaaagcgttatgcttacttgaatcctgcatctttgctccagaccaggcggtacaggtggcccaccaatgaagtatacgatcgaagatctcgcaatctcgctcaatgattcttaggagaagcctctgcggaatcatcgaagtcttaatcaaaattggatcgcccgccataatatcattctgagattatcgagcccagagccaatcgcaacccgaggctatgctcgtcggatgcagcgaaccgggtcaaacgagtatcctcggctataaagcgccaaagaaatccagcaccgaatcatcgaggctgatgaacgtattaaacggcgattcatccttttgcctaacctggaacgccttaccgaaagtcgcaagtccgtgtctgttcaaactgagaccccagaggtatacacccactcaccttgtggtcatgcttcttcagttgatcctacggtgtggatcttgattaccgccttttcaggattcaagttggtcctcacttatgcgaccgtgcagggaatatgaaaagggctaaatggtccgcttgcagtttgaattgggcattcaattggcattagaggattggtgccacgatgggtgttttgagcggggattcatctctgtcattgtctgttttgcttgggctatagtttgggttatgtacatattatattggattgagttgcaattgcagaaccctcctatacagttgggttttcttacctatcgtataggctaagatggaacaatctcattgttattaacagttagttaatatgttgagggttcagattgatcctagaagtgttgatctctctatatttagtcagagcgtgtcggctatatgaaaggcatatcattggttggagacagtgtggatagccatgacgtactggaagatatttccaaggttgtagagaaagaaggaagcattgcaataattacgagtaaatcgaagctgtaaaagaatatacgcgcttatctcgtcaagtggaatatgcccaaaagggaaatcccccacggacaagtcacagccgagtcaattccaatcgcccggggagaatggacatgttgggaattggctcaacggagtattcaaccgtattcaaaggatctccacacgggaaatagcaaggtcagcaagtattttcccgagacgaagcccaatgagccggcggtattttgttccccacacgattgaaccggtgaatcaatatcggactgcccctctcagagtcatcctactatcaatctctcctttctctcaactcaccaccatgtcgcttcccattcgctccttgtcccgagcgttggttcggtcttacggtaccgtccagggttcccccagtgctgcttcattgaccagcatccccctcaccttgaccgatgctacgggtgctaccggtccccggaccaattggaccctagatgaggtcaagcagatttacgagacgccattgagccagctcacttatgcggccgtaagtgcaattcaccatatggcttgatgccgactttcagctatactgaccctatactgacccctctaggctgctgtccaccgtcgcttccatgaccccgcggctatccagatgtgcaccctgatgaacatcaagaccggtggctgtagtgaagattgttcgtactgtgcccagtcatccaagcacaacacaggtctaaaggccaccaaaatgagccccgtcgacgacgtcctggccaaagcccgcaatgcaaaggccaatggcagtactcgattctgcatgggcgcggcttggcgcgacatgcgtggccgcaagaccagtctcaagaacgtgaagcagatgatctccggaatccgcgagatgaacatggaagtttgcgtgaccctgggcatgatcgacggagaccaggccaaggagctgaaggaggccggcctgaccgcctacaaccacaacctcgatacctcgcgtgaattctaccccaccattatcaccacccgctcctacgacgagcgcctgaagacgctctcgcacgtgcgtgatgccggcatcaacgtctgctccggcggtattctcggtctcggcgagagtgacggcgaccgcattagtctcctgcacaccgtttccagcctgcccgcccaccccgaatccttccccgtcaatgccctcgttcctatccccggtactcctctcggcgaccgcaaaatgatccccttcgaccgcttgctgcgcaccgtcgccaccgcccgtattgtcatgcccagtaccatcgttcgcctggctgccggtcgcatcgcgctcaccgaagagcagcagatcgcctgtttccaagcaggtgccaacgctatcttcaccggtgagaagatgctcaccaccgactgcagtggctgggacgaggaccgcgccatgttcgatcgctggggatactaccccatgaagagcttcgagaagcctgagcccaaggctgatgccactgctcctactccacttcctgtgcactccgaggctacttctgcgccggtcgcagcgagcgcttagacttttagttagactgttgcctctatatgactgcgtcaatagtttggatcgggatgatcctgcaaaatgcaatttcaatacactcaatgaaacctaggtcctctatgtagttattccactttaggtattggtcatcctaaacccatcttaagatattgtcttgccatgacaaccttcaacttagaacccaatgccaaagaccagttagttcgctgggcttgatgcttgcatggagatcaaacctacgcgacctgtcctcggctacggagatttacacccctcatgtattccgtgggactcgtcgactggcaatgagagccacgactttaggaacgtccacgagaaagcccggtttgatgtgtggtgcagacctacatggacctcatacatatggtaatgttatgatccctgtggtaggtgaagcagcatgtgctacgggtccctctgcctgcgctgtctcggggggctacggtgatatggtggtcagagagatggggaggagagaagaagaagagaagaagagaaatgggggaaggagtccttttataccctcgacaaacggtaccttcctcgagtgcgacagctccctcgcaccttccctgacaatgtcaatgtcacatgcattgcgccttctttgtttgttcacacgaggccccaggtttaggaaggagccttcaagtcaaacaattattccttttggctttgtcaccgatctaccccaaagccattccgcatatcagaactagtcatcttgaccgttcgtcaatacctcgggctcaagctcatcatcattgtctgtctcgtaatctggatcaccaagctgaatccgcttccaagtaacctttgaagcagtcttccactcagcctgctggaagtctggcctcggctttttatagctaaaccgatccggatcgcgccccccacggatttcatagtcctcgatatgcacaaatgctcggaagtgtgaatagatgaactcgatatccaccgcttatcccgagtatcgcaaatatggcagtcgcttcatcaacgaaatcacaacggggttgaggtgaagctcctcgcacagggcctgattaatggcgtgacatcctccggggcctagacgacctccagatcgagatgtaattcagcggcaaatagaggcgataaatgtcactgatgatgttgaattgtatcggggatgcgaggaaagtcaaagtcggcaatatttcgtccttcggggtccatgactccacgtcgactttagtcctgcttgtaaattaaatcccgcatttagcgcagatcacccgcactaaataaccggccatgtctaccaattagctatcccccattttatgaagttatttgtccagtcaggtgacactccctattgagaagcggtgaacacaggcaataaatgaattgacgtcgctgctccactcttcacgaccaaatgctgaaataccgaggctcaagccgagtgcacggtgtcgactcgacccacgtcttctgagtctattcagtagaggtcaatcttcacaccacaaatcgcaatgattgtcattgatttcccttttggtgtcaatgcgactgcgttttgatgtcaggcttagccattcccaacgacataatctgcagccaatcctcaaatgagcattctctaccgtctcctgttgggtaaactgatccatatagggaagtgaacacacgtcattcaaatgttgtgtaaccagcgccctcgtgggaatgatataagcaggatggccgctgctatagatgacagagtccaactcgagcatccatcatggattctaaccatgctaaaccgttatccaaagattccatgcaatcaacatggcgcacagcacctcgcagcgagtggaacatctatcatcacatgctcgacacactcaacgcctaccccatcgacataaacaaggaggtaccagtgcatagcaaagatgataaagtgccacacatgccccagtggcatcttcaacgctgggttctcttctactccgccatccccctcctcctccacgagacctacatggcattcaccggccgcaccataagcccaatcgtcgcagtcgccttttacgtcctcgccttcaacgcgatagtgatacacgaaatgcacatcctccgacgtctcggccacaaatacggcttcctcgacggcgacaagcacgcacgggatggcatccccgacgtcggcatcggcaaagtagttacctcactatacaaactcaccggatcccgaatgatcctctcaatcgtcctatcctacgaccaaacacaacgaccctcgcagatgtcctggagctggctacccctcgaactcggactatacggtgtcgtcctcgacttctggtactactggtaccaccgattgatgcacgacgtcagctatctctggcaataccaccgaacccaccacctgaccaaacacccgaacccgctcctctctgcgtacgcagaccacgagcaggaactcttcgatctgttcgttattccgatgatgacgtactttagtctaaagctggttggtctgccgatggggttctacgagtggtggatctgtcatgaatatatcgcttttggggaggtgtttggccatagtggattgcggatgcattcgggtgtgccgtcaacgctgaactggttactggtgaggttcggggtggaaatcaatatcgaggaccatgatttgcatcatcggaagggctggcggaagagtcataactatgggaagcagacgagactgtgggatcgagtttttgggacttctatggagcgtattgaggctgtggaggggaatgtggattatgagaatacggcgaagatgcctttgttctaggtgggttgtgtgaatgatgggagattgaagggaatgctggtgtggttttgagtatcttatcatgaattatgacacttatgatataaggaaatgatggtatcgctctgtgtagtcaaatcctaatcctatatattcccactacttaggtttctctcttcttcctcttctcaaccctcaaccctcaaccctcaaccctcagttctcaactccaaaagatactacccaagcagctacaagccatcatctgtgtccaagcagaacattcgacaactcaccgaaatgttcgacttgaagctccgtcagctttgatcgaaggaatcgagacaacgaggaagagcgcgccccagtgtatagtcctatgggagacgtctatgacttttgcgcgattctagagtgggctagtgaatcctagtctcgccgcgaatccttgtactggatgtgggcgttgaggccaccaaagaactctgcgatgcgtctgcgctcacgatcccacgggattttcctagatggtctcttcctgcgaccgcaactatgaaccggcatacgtctgatctctaaatctcctctcagagatcatgggtcaatacgctgatctagagagccgctacggcgttttctatctcatcttgttttctttctatctccggtttctgatatcttaccttgatgcgaagtgactgggtcgcagtgatacagctgagaagatagaggctaagagaatctggccatccggaggataatctgccgtgtttgtccttttgataggctgcatccagatacctaagtggctctctgtttgtttgtagagaatcaacttcttctctctctctcggcttcatgagccttagaccagctctcactttactcaatgtgagactgtatcaatcgaagctgtgaatttccattcaattctgtttggcatttgacttttttcggggaatctgtatttgaattaacttatgtctaaataaaattcttcaaattggttgggtacatagctgaaagtctgaatacccaacaagtccgagatgatgcttgttgatagcacgctaacctcatccacatcgctagcctgtattgatagtcgaacgtgaggtctagatcgaagcactaaacccctgctctggctcaaacccagggccattctaccaacacctcctttgagagggattcttcacggtgttcgttgactatgtgcttgatgaagaagccttcgtttatctgcgctgagatcaacctgagcgatgatgtctagagaataaaattgagagctataattataccaaactctatcaacccagagcatgaggtcggcaagaatctcctcaattctagaagtaatatcttactagtagtatgactagtggatgcatctcgctcaactcggccatcgtccgataacgctagtgctgacctacacgaaccattacacacgatcggcaagtattttccgagccctagctagctcttcccctccgtacctagtcaaagcgtcctactagtcccgggaataccaagacaacatgtggcgtgtgtccaatccccacagtagctagcgcgaaatacgtggctctttccacgaggtggggatatatatgactgtttaaggggatgcgtcggagcaaagagagtttagtacgtgtgcactatataaacagctccactgtgttcctggtatcagggccggcgatacccacttccgcgaatgagaccgctcgcagcagcaccgcacaggacgcaggccatgtggtcggctcatgcacaggatctggcatagccggtttgatcgaccccaccgggtcggcactagtagtatggaaccagggggctgggaatgagggaaaagggaatcgagggtcgaatacggagtagtaagtatgagattattacgcacataaatttcatagcgttcacaaggatgtgtgtataggtacatattcgtgacggcgtagctgatcttacaaatctggtcctagaaactaattatacacttcaactcccgaatgagcgatccttctgcataggcggtctgacatccgagaaaacagaaatctccacctgcttcgtgatgcccggaccggatgaagtgggagaatcgggcgcgccttcgatagacgtgcccgtgcgcgctgtgtgctcatggcccagaatgcgatcgatgctgttgttctcgacatcggacttgaacctgcgcgtgcggcgcgactgattcgtctcgtttggggcaccggtcgttttgcgcccgctgaaaggcatgccgagttcgtaggtgtgggagtatttgccgctggagagcttgcgcacggaggacatgatcaaggggcggatgcaggggaccgaggaggtgattatgataatgacgttttcgatgtatccccagcggattagttcgatgccgcccgcggctccggtatttgtgatgctaggtacggagtccagtttggttgttttgatgatggacgcgatcatcgcactgtggcagggtcagtatattgtggctatacggtttgggtagaggtacttacacaatgcctaagctgagaagagcgatcaaaccgagcttgatgggtagtttcaaattcaagttccagaacacgactgtcgggaagacggccaaaaacagatcggtggctgagttgaatgtattggagtagtaggcgaatttcatcacggcattcaggttgccgcaggtcgtcgcagcggcgactgctgggtcccagagagcggctacgttgcgacagatgctaagcggtagcacggccgatgcaacgttcccggcgaattgaatcgccaaaacaacccataacgcggcctggtagtacttgtaggttccgaccagggggatgatgtagataataaatgcggagcgggcgatggtggtgctgatggtgacgatcggcacctggattgcgatggattgcgatatttttcaagaccgctgccttgtcgtctgcggttagggtgctgagattttgaccgaagccgtgccgaaccgacagggtcagaaatgcgcttgatacgattgcaaggatctgtagagcattgacgttagtcgagggtaatccacaagctagtcagggagatctgcatacctctgcgaagatcatcagtccatcatcgatgcgaaaccgattgatcttgatttttccgaccacgcgtaaaataacgatcaccgcagcaatggccaccgcagcccaaattcccctctctagggatgggccaagattttgtgacatggtgggaatataaagaggctaactggatagcattgtgaagtgatatataagagatttcagttggcatgacgggtgagagtccggaagaagaaagagcttagcagtttgtgtcatcaaccccggaaagccttggagaaaacgattggatttggaaagtcaacttaatccatcgggtattaaaccgtaaccgtggaatgctctaagatgatctgtggttgagccatggactggccaatctacgaccttggctggagtaggtttcgcgacgatcatttctatttgagtcaaaatgagccttcgagtcttggaagttgcatgttgcctattattaatccggtgcaaagtccccaaagtcaattcgtgcatggctggttctctctcttaactgcctctttgggaggattgaaaatgcgaataggacaataattggttcacgtatcataatgtcatagtaactgtcgagataaggccctataaaatacccctgaactacggaattgttaaacgaagcctcaagccacaaagcatacaatatattaaaggctgacatcctgaggtggggtttagtgggtttaattaaacaccgattggaggaatttcatctgcgttaccggcgcagtcaaacaccgttgaaatataaggattggcagaggcttcaagtaaaggggggttctaaagaagcatacagtccgaacctatatcctcctatagtggtaagggtcttggcacgaggtattcctcgtttaccccggcagaatcccgacgaaaagggcggaaggtagggctagaccaatagaagtatggcagccacgtgggcggtagaccttaaaactcacttcggaaagtaagtttgtccaatatatggggctaagcctgattgggcagccttggcactctttcccacggtcagaaaagtctggaagcgccaaccttgggattcctcaaccttcaacattccgaatcttggaatgaccggggttctctccaagtggggattcgacggggtttgcctgaagaactggatcagatcctcggcatttctggtctatccggggcctccgtgccgagattagattaaaaagctgaggttcgcaaaaggagaatagcatcatgttcttagaataacgctggaactcatctccggtcaaataactggataactatcgcaactgacatgtcgatcacgcgtgcatgaacactattatattgcacaagtccgggacttgtgcctgccgttcaacttactatctcggtcccaccccggcgaaattgtcccacatttattgattggactagacgcactaggaaacatctccgaatgttcagagattcaggttcattgcaggaatacaaagtcaatgtatatagacgggaatgatcggcacctgtgccttcatttctctccaaccttatccctttcatctcctccaccatgaagtggacattgccttccctcgtggctattgccgccccggctattgcgtccaactgtcactgtttaccaagcgatagctgttggcctgccccatcggcttgggcatccctcaaccacaccgttggtggtcgcctggttgctaccgtccctatcggtaccccctgccatgcacccaactacgatgctgccgcctgtgcagcgctcaagaccgactggaacaaaccccagacccagtaagtggtgcgagtatggcaaaattgacatcgctaattgccccagtcttgagtcctcttcatcggtgatgcaaatgttctttgccaaccagagttgcgacccatacacgtccaagaataagccgtgccgcctcggcaactacgtgaactacgctgtgaacgtctcttccagcgcgcaggtcattgctgctgtcaattttgcccgtgataacaatatccgcttcgttatccgtaataccggccatgagtaagtcgcctcaataatcctctacagataaatgctgattgatgtagctaccttggccgttcaactggtgccggtgccctctctgtttggactcaccacttgaatgatatcgagtaccaggactagtctagtccgacctacacaggccctgccttcaagatcgaggctggtgtagttggttaccagatcctcgaggctgcagccgccaaaggcctcgtcgtcgtcggtggcgaatgtcccacggtcggcctcgccggtggctacacccaaggcggcggtcactccgccctcagcagcaacttcggtcttggtgccgataacaccctagagttcgaagttgtcaccgccgctggcgacctggtcaaggcctcgcgcaccgagaaccccgatctcttctgggcactgagcggtggcggcgccggcaactacggcgttgtcatctccctagttgtcaaggcataccaagacgcgtccattgccggtgccgctcttgagttcaccgcagctgacatcaccaccgacaccttctacgaggctgtttcgcagttccatgctctgctgcccgccatggtcgaccacggtgtgactgtcatataccagatgaccaagagcgtcttcatcatcgaccccatcacagcctacaaccagactaccgatgacgtcaaagccatcctcgagccattcacctcgaagctcaccgagctgaacatcacgtaccaagccagcttcaccgagcacgactcgtactatgaccactacaacacgtacatgggtcctcttccttggggcaaccttgacgtgggcgcctaccaatacggcggacgtctgattccccgcagcaccctcgagcagaactacaacgggatgggcgacgcactgcgcaccctgacccagggcggcttggtcgccgtcggagtcggcatgaacgtctccaacccagtcaacgtctccaacgcagtcttcccagccctgcgcaacgcagccgtgacgatgcaattcggcctgccgtggaacgagaccgcgccttggtccgagatgattgcggaccaaaagaagattacgactaaatatgtgcctgcgctcgaggctgtcactcctgacagcggctgctaccagaatgaggctgatttccgccagccgaactggcagcagaccttcttcggaagcaactacgcccctctgcttactatcaagcgcaagtgggatccttcgtcgttcttctatgccctcaaggctgttggcagtgatgcctggtctgtgtctgattcggggcggatgtgccgtacttgagcttcttgagctagcagatttcatttcatagcgatttacagttcctgtttagatgttagagatattttcctattgtgttgactaattttgttaccgaagatcatgcccaaacctgcacatacacatggaatatcatctctgtcggttcttatccgaagctataatgcatctttttgtagcccttattcatcgaaaaatagtatcttaaatatgctcgaaatgctcaaagccaaatctatgtacagaaatctataaccaaatcaattgatatcgccaagtagcaagtgtacatcaaaacatatatatacaaacaacaagcctagaccgcagcattattaccgcaagagaagctgtcattagaagagtcatcatgaatagccttgccggaaacataaaggccaagaccacacatacaaccaccaatcagaataacgcacaagttcacaacagtgagagcaatcttccgcggcgaagagaaccacttgcccttattaatgaacaaccaatacacaccacccagaccataactgaaccaactcgcgaacagcgagctaatcaaactcagcaaatcactgaagacgggaatggcatcggcaataacccaggcaataacccagcaagcaagaccaatgcctacccaggaaccaatggcaaccaagtcacgcttctgcatgcggtcggtgcctcggaacatgcgcacgtagatgtacttcagaccgatgtggccgttgacgacgccggcaccgataatctgagaatgtcagctgctggatatgggatcggatggggagaacgtacagttgggatggcgattccgtaagccacctttttcatgataggacctgcggatccaagagcgggggatgtgacctcctggccgacatagtagtagatgaccaccgcagcaacgacgtagaagacaatttcaaaggtctgcagcatgaccagagccttggggaaatccctcggttcctccatctcagcgagcagaccgaagaaagccacgtgggcgcagtaggcgaagacgatgttggtgacggcgccgaaagcctggaccaaatcggtgtcgacggtagccttgagattctgaccacccttgttctgcaccccgactgcgaccatagtgatgatgacagcagtgacgatactgataaaggctgtagaagacaattagtgattattctctaagtaaggaaaatctggtacgtacacatgcacgagatataggtcatgttcttcatagtacgaggtaaagagcagacgaaacagatgacgaatccaacagctgtgaaaaccatcgtgcaagtgccgtgttcggtaacggtattcatcatgacgctgaaagtcaagatgtgggaagccataatgaaaatcgagaagagcagctggccgaggccgaacagctcgcgtccaaaagcacctaacaagacctcgccggcatcggctaaattctggatatgggggtatcggttgcggaattggtagattgtgtatccggtgtaggtagcgagaatgcccagtccgacgatcaggatgagagctggggcaaggcctagctgggcgagggtcttgggcagggacaagactccgagagagacggattcggcgatcatgactagatggtggtcagagttggttcattgtacctaatcaactgataacagttttgatcatgcgtgtggtagcacttacacattcccgtttgcctattacggaattagcctatatccttgaagatggtttcattgcgtgtacttaccaccacttcatagtcttatacttaacctcggcaccctcctcatctccaaaggcatcctgatactgtggcctctcctctagaatcttcttctcattataccccgactccgagtcagtcgggtcctggtagggtgtcactccatctggaatcatgatgtcgacgcgtatagagccaaaactggaatatagaaaagacagaaagaaagagagagcctagccacttgtatatgtgcaaaaggaaaaaaattctcgaccagaggtggatctttcctcaacgtctgagacaaccccggcttcacttgtatggagagttggagggcaaaattctggagcccggatcttctggaaggtggggatgtaccgggctgaacggtgaatgaatttatatttcctatttcctatttctaccatatttagttaatattgcggctcactgagacgaaaaaagagaaaagctttgatgccaagttgcgatcatataaattaagcgtagggagacccgcttctgaacagatgagtggagtcattatgacccgctttcctgaaaatgggccaattacagactcggctcggaattctattatctaagaagaacgccggactgcgctgctggccgatggtagccgcttccaagcttgtcccgggccaatcccgagtaaatggcttcgagctgttactaaatgccaagacgtgcagccgtataatcgtggttactctatgcaacttatgtcggttattgggaatatggatgaacggcatcgtacgttgtacaccgtacctgagagaaggcaaatcttagggctcagtagccagaagaattccagtatacaaagagcaactgtgggggagtgaagctctttcgccaccaaaaaaatcaattctagtcaagccttgccaatctcacctaggcaatggttcggttatttcgtaaagccgcatatccgaaggataatgcaggccattggggcagatgctgctatttgtttggaccaaatagacccattattataaataataactcaatgctttcctaatcgggactttctattatataccacttaccgaaatagacaatggagtctccgtacctatgtattgtgtatattgtacatcgtacctccctccacattctggtccctgcatctccagacttaccccaggttgcaagcaattcaaacgtaagtgaatgttcaaacgcgtgaataatgattatccgcactcgggctagtcgtaaaaagcactccactcgtagttatcgtggggtccgtcttgtaatttagttaatgagagtgttgctgctccacaaactcctcttacggtgtatctatccaccgaagatgaattcatgaaccaagggccggaattatccgtgaatatattgactagttgtccacacccgcagaatagccgtaccccactaaagtagcgaaggtggtcttaacgtcgagattccatggggccgacaacgtaggcttgtgcaatatactattctgtagggaatgtcattaagttgctagaattgacttaattgacttatccatggtggccacggtgtgtacatcgcatattgtagacttctaggaaactttggcctgggctttgagtagaggaggtgcctgggtgttgaattgaaattccgtctagaagctaccgtggtcatttcctcggatttcctgatgattggggtccagtcagatatgtcctcatcgtcgcagctggtgcatgtgtaacgtgtcgaggaatgtgttcagggcagtcgtcgtggtatgatttgcctcgacattagttgggtttgaggtacacatgagaactctaaaaatagcctagaaaatacattcaaagatgaacgattctaattaatctgatattccattagatcagatctgtcgctcaagcttcatctgatgaaacgtcctgactacaggggaatggagtgatcaaccagaagcagaaagatgaagattgatggaagataggaaactagctactgtacagcttcgtaccacaaagccagctagtgttagaacacttctcagaaggatatatcaaggtaaaataggttactatagcgagcatagttaccgatagatctactaaggcactatctcagtccaacaagcccatactacacttcctaaggaggtatatcggagtatacagaccggcataccggaggatcaattaatcctatatgttttgtaatttagttgatataatcatggccctgtaacaataaattgtgtgaggggggccaatacagaattccagacaattgtatactattgattagacggccaatttttacacatacagcacagtcgacatatgcagtcattccacgggtaccgtacgggaaattcaccagacgtacctgtctataccatgagtgaaattgtgagaacgcgttaataatagcttgtatatggcttggtagctccagaccatgactctcctttcgagcgagtatggctctcgggaggaaatgagtcacagcacggcttgctgaagagcacgggcggcatggaaggctatagctcatataagctcgctcttagtgctccgcctctcctagtccaagcattctaggcctagatctagatctgacagtgattgcggctgggttcttctttgatttcattggcttaagggtggtgagactcggcaaaacaatcaatctcaaccccgcaaagatcagacgaaaatgaagatctcgaagatatcgaggtattactggctggagactctcaaaaatcactttttaccatagatgcagaaggggtgacgctggaaaagttgaaaaattgtaaataattggattacagtgtggctgaccacttaacgtattcggtaagcgagctgcgcagtaaatgcaacatattccacatttatatctccacaacgacgtttcaacttgcttttattacttgtcgatagccatcgataagaacttttagcaatatatctcaatctcagagaaatcggaaagttgtatcattgcggtattgaaaattacatcactgaactataagaaatatatatatctcaatcactattacactaaatttctcaaaactccctagagtgatcagatatcatatggagagcaatatgctacaagatagagttcatattgaccacagttgttgcattatcatgttgtaatttatcgcttttactatatgatttggggtgcgcagctcgcttaccgaatacgttacgagataagactcgtgtcaatgctaatactactgcacttaactcgcctgcatgaatcatagagaggtctcgtatagcgacggcatctatcgaaccaaaaacaagagttgaactgacatacatctgcatgtcgtcggcatgacttgccttgtcttgcagccaaccacgtctagactacgttggatcctggagcaattcggcccaggcttcctaatctaaagccggcgctcggatagtcgcccgtatacaagttacgctggagtgatagtggcgtttctgattgcagtagccatgtttgcccgggcgtgcgcttgagatgtgtatgcttgctttttactagacaggctattttaggctttgctatataaccttagaaaactatctactcagggatttctctcatttattcatcttcccacttcgatctgaacactgtttctccctcaatctcatttcccttgggacatccatacgaacggacatcttcaatcctactaggggctgatcatgaagaacattcgtaagagacatgtcattcttgtcgatggaccatggtacaatgatgaaggggagctccgtgagtaatcgaaagcctagtcccttgacgtgaagttacccaggctgactgagtccagactatggtagtggcggcaaaagcacaatatggcgaatcggctcagcgacgaaagagggtaaggtagctgacgataagggagacgtaaaccaggtgaggatatatcatttctatcgggcaacatgtctatagtctcataatgtgactgacatattctactgcaggttattcgatatttcaaatcgagtaaaaagtccattatcgacagaacgaaagagcttgtcgacgtaagtaaaaaaaaccaatcactatcccttctacaagctaacaaattgtggaagatttgcaaatcagcaagtacggaagatgagatatggcttttcggatttagcaagggtgcatgtaagtacaacccttcttctacaacgaagcctcaccaagctaaataattggtcccaatcagtggccattcgtgcggtggtagatctcctttgggctgccaaacgtgacgaacaccggcccgtacaacgttctttctcatcattcttcaaattgaagaaatcttcaagttcgctggttgaggtatgtcaaatgtcgtctttatccccatgccttctgatactgacctggcctctattcagctcgagaaatggtaggaacggaactttgggacttgaaatctagtccccttgctaatgtatttaggattcgtgaaagtggagcaaagaaatgcctgccaaaactatgttttgtaggactatttgacacgatacatgattcatccgtcgatcaatcgttgcaatggccagcctcgatatatctttatcatgcagcttctatgcatgaagatgataacacacttaaggttcgtctgcttagtgaggatgcatcaaaaaacgcttatgaaacacccaaatacgttgaagcgtggttcgcgggatctcatatagatattggtgggggcgcaaatcaagatggactttctctttatccactgcagtggatgttgatcgaagcccagaaaaaaggattatgcttgaacaagcccattttacccgataagaaggaagggcaacttgttgaggacatagtgcaacttgtttttccatcaagcggaaaaaccttggactccaagtcatcagtgatcgatccctggaccttgagatatgccaataacctcacgatccagctatacaatttgcgtatttctcaccagcacggtaacttgcaacaagagcaagatcagcgacctaaaaagaacgtccttatccaagcaagaaaggagccagggaatcatcgcattcccgcaaatcagcgacacaacgtcaagttgaataaaacgagaccctatacgcaacaccgctatggaggcagtggatcaatatatcgagctatattcgcatctgaagaaaccgacacgccgtctgcgtctaggaatgaactggttggttattctcatgattgtaagtcaatcaaagaagcatctgagatgagaatatacgctcaaaccaacgtcattaggtgcttttggggtagtaatacacccttcagtatattttctgatggatatctatcctcggtatctgaaggtaaacgaattgcccagagagctttccttggacctccaaagattccgagaaacgaagttgcttaaagagaagcaatttgacccctgggtctcagcatacaatttggatcatttacccaaatgccgcatccttgtttgtggagccactggggttggcaagtctactcttcttaatgctgtgtttggcattgaattggtaagtaatgtttcagaaacgagaacttattagacagcatctaattgatagcagacgcaaacaagcgataaagaatcggtttctcacgatatcaatgaggcattggaaagcgatttgcaccccggaattatcattcatgattctcgtggtttccaatatggagaatcaaaagaagtcaatatattgagagatttcattgagcaacgccaaaagtcagcagacccaaacgagcgactagacgttatatggtatgtaatctcaaaccctggaatgttcatttctagcgctaaagttattttaggctttgcatagaagtatcctcaaaacgacgccttcaaccagcccacgctgagcttttccatgtgttgaaagaattcgattgccatacaccggttattgtagtgagaactcaaatggacaaagagcttaaggaacggcagtttgatatactcggtgcggcagcagaaggccagaaacagaatgagtcaaaagaaccaaatggactggcttgggaagtaatcaaagcacaggctgagaaggagtttttcgaggcagagcggccatttgaaatggatgtcaaaaaacatgacccgaaagcttgtgtggttcatacttcaaagggtaagatctatgactctgacctgaattcgacttttcagctgggggactttgctaaatcttacacagataccgattcttctatacgaaaacttgtcagaacgactttagaagaagttgaaagatacagtccagaaagaaaaacttctgtcgcggctgccttgaggcgtgacatggattttaaaatcggagtggccattcaaaggacgtttgacatgataaactacgatgcccacatgtggcaacgagtcatagctgcaatacccttgactgactctacaacaactcccataatgtgccgggtcctctgttctcgtattctgtcttgcttcgggctacccaaaatcccaccagacgccgcggcacacgtgttttcgaaggttattttgcgaaacctttccaggttcatgatggaaagcatcggcactgacttttggaatatcctcgctggtgccaacaagcttctcctgttcggaattgctccaatacccaaggcaatgtggcctgccgctaggatggttgttaaatgtgcctgtgatgtgatcattatccttgatggagcgatcaagcagagtggattcatggcgactcccgaaaacctgcatgaagttcaaatggcttacgcactgaattacaacccagatgagcttccgggtagtgaaaagatgactctaaggcagttgacccacaaagatgtcaatcgtgagttcaagctgagcaaagaattcaatcaaaagctggagtatcaggtcgccaggcacaaaatgatgaggattgtcatgacgcacagactcaaagagaaagctcacttccgggcttcagccccgagtttctatcaagagacagaaaatcaagacgccctggatgcattattttcgggggattcaaacacgctcggtcaggagattgatgctctagctcagcttggagcagacgggtgtatgtccggtcaatatgacgaagaaattgcagatcaatattcagaatacacgtatagccaagacatggacgattcattgtgcagaagcagtgtctgctttgatgactcggcgagttgaaattgccatacatgggtggaattatacacatttgtctacaatacctttcggatctccggcatttctctggtttaatctgcccttataatcttgactgtctcggatacttgcttctgtatatatctctacggtagcattagggttctacttcagatacaagataaggcttcatattcgaaagatgatcaatcgttgaaagacttgaacagattgagtagggcaaggacagagtttgaagttccatataatcgatttaatacggccacgctataatggtttctactttaaagagattatatgtggccagaaagccatctcgagttcctgctggcacgtagatcgtggatggacacgcgaaagaagctgcgcaggggcccgaagaaccacggaactccctcaatcggtttatctgccttgaacgaacgcgctagcggctacgacggtcgagaatgatgatggggttacagggcgtgtttggggtagatggtatgaaggtagagcagggccaggaacgttcattttaatgcggtgcaagtggtcaattgttgttttgtgtctacattcggatgggtcgagcgaaaggctcggactatgagaatgttgtcgaccgtagaagagggaacgaagttaatgggagggaatagagtaattaactagaagtagaaagataaagattgatacaagataggaaactagctactgtactaaggcttgtctatatagcttcgtaccacaaagccagccagattccatctactagaacacagaagaagtatctctacggatatataaaggagacgccgaagcgccaagctgcgcgtttgccggcaaactgtctgccagagaagagaaagagaaggaagtaatgccatacagaaggtctacaaactgcatatggcaacagtgagcacgtcagaatacgtcaccatcggactcatcatacctcttccctgccagccttgtgaaccacaacagagtcaagatctcaggccttaggattcgagcctggtagttgactcggtaaatcagtatgagatgatttagccggcacagcgatgtgacccaattcagcgtcttgatgagaacttcccgacgtctgtggtaacgaagatgatggatgtcttcgtcctttctttttccattggcgcctgtaaaataggaacgcgccgacgaaagcgagcactacgccagacgtagcaccgataccgattccagccattgtaccccttgaagtattgtgtggcgggctataggtgctcctggggcgtatgctagtactcgtgcgggttccatccgcggtactggcagcatgcgctgcttggatcgtcgcaaagccaagacctgcaatcgttggcaatgcggcactggggttgataggccagtatgcattgatcgatggacaggaaggagtaggaagcgtaggtggagggagggtatttgcagtcacggcagaccaccttttcaacgaattgtagtcggccagggttgtttgcgtgctaacctcgaagagccgcggcgcatggtggttgcagctagtttcagagatgataacgggaacccctaggcctcctagcctcgacgtcaatacatcgtagtcagaggcgctcatggacgagttgcacccgagttcgttgactgcatagaagtcgatagcctcgtcactttttcctccgcacaccaagtattctcccaacgtttggatataggtatactctgaatctgtggcgtatccaataggtatagcgcggtacttcctagcagcagcataagctttcatatcccgggctgcggcctttaggtatggggctaggtcgactgtagggcctatgtcatacatttagtgagcgcaaagactgtgagcggtgggtttcataccttgaccagtaatagtttggctggaaataatattatttccaataagaagccccaggagattgctatacccggccattgaatcaagaacagccgcatattgttcgaaaacgcccatttgccatggtgagttgaccttgcagagatgttagtatccataaagaacacacgaacaaccgaaaatgcttactatgttcgagctgacatctgtccaagctctttgagttgccatgtttgcaatcacgtatattccattgtcctggaaagtctgcatgcatttatcgtgaccctgagtcgcatctgtatagtacaccctgatagtgttggccccgagtgccttgaggataggcgcatcgattgcgcactggctagccctcgaatctgccaaaacatcgattgtagtcgaaccagaggcatctccgatgtaatcgacacctgtttcagatgttatcttggcttggcatcgataacacagttcaaatgatcttacctttgatctgaaatcgatggcccctactcaataacccattccccgcgaccgagataacaggcagtgacatctcaagacacgaagacacaaaggtggcaggagatgataaacacggaaaagactgcgggggaagtgaaaaacagggtccgaggctatatctagggcgccatggcccctacataggcttgcccaacccggtatagcgcttacatgtgaagcggtttttaagattgcaataagcccggttgataacgaatcctaccttgaggtcatggcgtatcttatagaagtccaactctcacggatataaactgtggagctacagtcccttgattgtaggatccattcatccatttttgcttcatattgctccgcgttattaaatcataaggtctttaggtgttatgtacgccagcggccttccagagccagccccggacctgcaaaaactcgctcagagctcagagctctgtctgccctattcgcaccctaacaacacttcgcacccacggaacttcccatttactactcgttcgcttgcatttttactcacattaaggatgacacggtgaagggaggccacaaacggccgcttttgacaccattttaagccgctcacgtggccggtcttggcgtcacgtgcaccaaagcccacgacccgctgcgggttagccgtgtctggttctacgtatcttcaacttcccctgtatatacatacatacactcgcaagattgaatccatgtttctgtaatggggctcgtcgaactacccactgagatcctgtggatcatcgcatcatgcctttgccgctaaacggatatttacgccttcgtccacaccaatcgtgatctatacgaaagacttatcaagtctctatattactttcacgcccggtatagacatggagccaggctctggtttctcgcccagcggaacctctttttacaagttcaaagtttgctagacgggctaaatgctgccagcaaccagcctccagcatcccgggcagtgatagaagcaacggaacggaaacctataagaatgtacgaaaaaggcacgatgctaagaatgtaggaagaagaagaagacacaatatacagaatacgagaaagtctggaccctatggatatttctacccaccctcttctccaacagggatacagcatcctgggtattaggaatatccagcatgctctagtgctggcaattaagggtggctataccgaaactgtgacccttttactagactttggtacataggccaacttctacagtagggaatctatattggctacttacaattagtggtatactaaggcgattgattacccgcccctctttactgcggtatagcacgtgagggtagaactagtgaagttactgcttcagtgtggtactgatctagagctatttgccccttcaccattatatcgtgctgtcgaagataatggacgggaaattatccctatattactcgaatacagtatagggccgtaagtaatagcgttaaagctagctatactaaacgaggataagtctatagtgagatttcttcttaatagaggattcaatatttcaaagtacggacatactggactctatacagctaaaatgagggtgacaaggatatgatcgacttattagagtctcggggtgtaacattagctgcacttactaatgctgaaaaggaaaagtgggagacggcagacggggatggcactctgcctctttttgataatgtgtttatttccttcgaggacgaggtcgatctggatgagggtgagggtgaggatgatgagttccggaattagtatgagtattgatgggtacattttcctgcatcacatattttcaaattggttccctttatttttttctctcttatattcctgattgtacaaacgaatgcacaactgcacaactgcacagtagatatgattaggtattcacgtctatagtacctacactaatgctgaacggaggagacgctccagttctcgtagcgactcgggcttggaagtgacactagacatcaagtaaagcacgtttccaaggacgcgcgagtgaacattgaactgatcaccaccaacagccagcttctgctgcagtccctttgcagcattggagttgtagcctgtcatatattagctttatcaatgattcaggtctgaagaacataacatacctccaccagctgcatcacgcagtgagatactcagcacggttccaatggcgaacacgctctccacggacttcgtggaagagaggtcctcaagcagaccatgtgaccagacactccacacctcgggagctgaagattcaacagtagcaggcgagctgctacgccagtcagcgcggtatgcatcccacgatccatcggtatcaagcttggccatggtcttcaaggagtcaacagcgaccgtgcatccaactgcatgggcggtgtaactgtggccgtggagaagggcatcgctcttttcgggactcgagaaagcattgaagatttcctcgctagcgacagtcgtgcagagtggtaccagcccgcccgtgaggagtttggcgttgacggccacgtcggggtgcactcctaagaaagaggcggatgtccgccgaccgagacggtacaatccggtgaagacttcgtcgaagatgactgggaggccggaccacgacggggattgtttgggtgcggtagcgttgggggaaaacagctctgggtggtcgcggaccacatcggtcaggcatctctggaagagagggtcactaagggaatcgttagttcatgtaaatgaaggatcgtagtggattcttaccagaaaagcattccacccgcaccgaggatgaccggttccaagatcaatgctccaaacttcactccttggcgctgaacgagatcttcaatagtgcgacggatgtagtccttgtaccgctgggcagtggcagactcaagacgctggctgaggtcaaacaccgatcccaaggaagcgaaatcaacatcctcgccgagttctccctgcagctcaccggggatctcgactttccaagatccgccaaccatcttgacaagaggaaaatcgaaccagtggccacgaccacgataccactcaaccttcttattgaatgtcgaaggttccgaacagtccatcacaccgatagtatcaccgtggtagctacccttgagtccaagaataccaacctgctcctgggaggcatcccaaccgtaccggtcgcaagaagcgcgtagacccatcttcacagcaacttccatccctgtacttccattgtccgtgtagaagactttagtaaacctcgggttttcgatggttttcagtagattatccgcaagcgtcagcgctggctcatggacagctcctgcgaacatgacatgtccgtaccgaccggcggcataggcagcagatagtgctagttcggggttaccgtggcctaagccttgagtccaccaggacgcggatccgtcgaatgtcgggcgcagttcaccctctgcatctttggatgtgttggagccgaatgtttggaagtagtcatcatgcgctgagtcgatgacggtaatgtccttggccttcatgccttggtgctgggtaaaggggtaccatatcagctcttgcgcacggtcggccatctcttcgagacgctggacgcgctcggtattattgacggacatttcttcaagcaatcggagaacctccgactcctttgcggagttttggtagtagctgaacatggcctcctcgtcccttatttgggagtcggcatccagccgcgacggtctggctggaggcgctggtagcgacaccaagggaatgctctttttctggaagtattcccggaggtattcatgattttgatagtactcatctcggaacacgagaaccgatgagatatcatagccacggagaagcaacgactcgtaggcagaaatcgaagaagagataccccctagacgagagtctgccaccaacacgattggcatccgaagtggtcgatacaagtcagcctgtgagttgccattggggcccggggagtgcacgcccccggccgtctcaacaagggcgaagtcaatgtcggaccgcgcccagccggacagtgtgttgtgtatggatgcgagaaggtcatcgtctcgcggaacctgcgcgatgagctttaagtcttttaattaggacaatcgcacttacaaatttatcctttgctgccaagtgcgggctcacgggatcgtcgaattggtagagacatttggtgagcgtcccggcgccataacgccgcaagtgcctgcgaccgtcagtgaccggaattaattcaatcgaattgcttcaaagttcgcctaccgatcatcggcatcatctaatgcccccgtagaaaccggcttgaggaatgcggcgcgctgtttctggtgttgaaccgcattacacagcaccgtggagataattgtcttccccacgtccgtgttagcgccgtagacttggtgggctcgtaaactgcgccagagcgctgcgccgaccggaggcatgacgagatgaatgaagtgagtcacgatgaagtccaagagacctcggcgggtcaactgccattgagtttccgactccacgcaaatccccacaattttgcatttcaccggattgtcctgttgggtttctcaacgacttgggatcttggctttgggaattgaattggttctcttgccaatctcaacaatcaacaatattcgaatcggaaatcaagtggatagccgttgacaggaacagtacaggaacagcacaagaacagaacaggaacaggaacaaaagaatcgacgtgatcatgaaagccgatatgactcctccggggacatcgaggacagcagggacagcagggaaaacatcgcacaaaacactcgttgactcactatccgccactttgtcgcgccgggaagccaaatccgcccgtcggaggctgaccattttaccccggacagctgtggatttctcctccaatgacttcctgtcactgtcaacttcctctgcataccgagaacgctttctggcactgttgaacaacacgccgccatcattccctcttgccagcgggggatctcggctattagacgggaattcggcttacgcggaagagctcgagaacttcctcgcgacattccatcgagccccgacagcacttctattcaactccggctacgacgccaacgtcggcgtactatccagcatcccccaaccaggcgatgtgattttgtacgatgagttcattcacgccagtgcccatgagggcatgcgtctgtcgcgggccggtcctcgggagatgtttgcccacagttcgccggttggcttgagagaggctctgcagtcgcaaatagatgaagacccagctattgcggaaggcgcgcgcaatgtcttcgtgctcattgagtccatctacagcatggatggcgatgttgcgcccatcaaggagtttatcgcggttgttgatgagctgctacctcaaggcaatggatatttctacgtcgatgaagcgcatgcgactggtgtgtttggaccgcggggtgcgggcgtggttcaggaactcggcgttcaggatcgcatgttcatccgagtgcacacattcggcaaggcactagcgagtcatggaggtatgtatgatctgttttgatcgcccgttgaaataccgaactgaccatatccagccgtggttctctgtggaccagagacaagggattacctgatcaactatgcgcggagtttgatctataccaccgctctaggattcccattcctggcatcgattcgcgcagcctatgagatcctagcatctggtgaaaccgaatcagtaagttgatcatttctccatactcctaatacccagctaactggttcacagttacaacgccggcttcaggagttgatcggtcatctccgacaacgactggcgggcctccatacatatcaatcagtcatgttcgaagtcgaccatttccccacatctcccattatctcccttcgcacatcccagccgcgacagctggcgagtctctgccaggaaaacggattcattgttcgcgcgatcatgccaccgacgattcccgagggaaaggaacgggtgcgagtgtgtttgcatgcaggaaacaccgaggcggaaatcgatggtttgacgcggatgattcagtcgtggctcgatcaaagtcacagaaatgtatcaaaattataaaagtatgaggtagttgatttgcatctgggattttctactagtaatctctattcaaggccattcatttaaattgttatctcataggtcgttatccggttacttgaatgcttatatgcaaacaaacaagacgatgtttcatgtccttacaatatcagctggcaaacttcaaccaccccgtcctgctgattatggcccataatccaaaatccagcccgatcacgttgtcctgcttcgggtatcaaaatacgcggccagcccttagcccgacggtccgaggttgccacctggtcttggtacctattgcccagcctcggcaccagggatggatgtcggcgttatatgtggaatggatccgggattcgggccgtgatgcccacttattcttcgtgccaaatacctccgcaccgagactatcagtgcggagtatcgccgaccattaccgagggtgtttaaatgggataccgacgcggaaatcaactttgagatgattcggagctagtactccgtagatcaaatcaaagtacactgttgtgtaatgcctgaagtagtgtgtaaggccactatgtgcgaacttcactaattcgatctcttggccgatgaagaaagtccgtagaatttgagattttacagggcaattgttgtagaatgcatctatttctattgatttaaatcctctgtacttgaaattacttgttcattagatatctagaccatagattgctccaccttcatactagcctgggtatccgagcggtccatagtggtataccgactgaaatctctcagatcccgacggtcatcaccaggcgaaacaccattcgccactgccttgcggtcctgacgacggaagtaaacacgcttgcaccacttccagctctcaatacccaagaagaaaagcaccgtctcaacaaacacaataccccactcccaagaaatgctggtatgcttgaaaacactgtgattgataacaggaatgtagatgatagggaatgcaagaacgaagccagtcatgatgccgaagaagaggaacttgttgcgccagatatcatgcatccactgggtgtagcgtttcttagagtcgggctgcatgtggaagaagctgcggcgcagatgcatcatctcccaggcgaggaagagggcgaaccaggtcatgcaggtgaaggtagtggcgcgggcgcggaaaaccgtgtcgcagtcgtagggtttgttggggtcgttgtaatgtgtgttgcagccctgagcgagctcgccgttgccccatcggaacatgacgagggagaatgcggacagacagagggcggccatccagactccgtagacgagggtgtcgacgatgatttcccaggtgaagataccttgtttctgtgatttgttagtaaattgaattgttagggtaaggcttggaggaacttacactttgcggtggtcggtccatcacttccggggcggcaatctccattcccagacccatatcagggagaccagatgtaatcatgataatccagatgatctcgacgggggagatagggaagacagactggttggtttcatccttgaaggccaatccaataagaagggtcaatgctaaagcaacgttctccgcaagaagatgtagaacgaatttctggatgttatcgaaaatgcgacgaccttcctcaataccgttgatgatagaagcaaagttatcatcggacagcactagctcggaagcatccttggccacatctgagccattctgacccatggcaatgccgacatcagcccgcttgagcgagggagaatcgttaactccatcaccagtcatagccacaaagcgcccacgacgatgcagggcatcaatcatacggactttcgtattaggggcacagcgagcaataaccaacggaagggtgggaagttgatcaatctcatcttcggtcaatttgtcaaactgggaagccgtcataaccatagcatcggcaacgtccttcgcgatcatatccatgttcgcaggaatgatcccgacttgggctgcaatcgcacgcgcagtaccggggtggtcaccggtgaccatgtgcacggagattccagccttgtagcaaagggcaatagcaccagctgtctccggacgaggaggatcgtagagaccgatcaaaccgtagaaagacaaatccttctcgacgtcctcgcggggaagagggctgtcgccttcttttgcaggattggtgttctcgcggccggccatagccagcacgcgaagaccctctttagccaaagcctccatgttctccaagatttcatcgcgtatttcatcgttgataggaacgggctccgagtcaggcttccatttgatagtggtgcatgcctcgagcactcgctcgacagcacccttggtgaagatcatttcgcgactcttccctgagttattgtcgtcgcgctttgtgaaaataacagacattttcttcacggttgagtcgaatgggtactcggcctgttgctgccagatcggcttatcgcccttggtccagcgagacagaccccagttgaatcgagaggcgaaaacctggatggcaatgtcggtgggttcgccgcgagcctgccatccctcggtggcactttggtgaagatgggccaggttggccatggcagtgacgttgaggaagtccttgagcgtatcgttatcttttaacaagtcatctggcgatgcaacatcgcccaatttttcctcgcctagtttgaccgggggctctgcaatcaagctcagctcgccgtcttcggggttgagaggttcattcgaggcaccgacggagtaagttcctagggatgggagccaagccctctttgcgaccatgcggccttgggtcagagtaccagtcttgtccgagcagatgttggtaacagcaccgagcgcctccaaggaatccagcttccggacaataacatggcgctggaccatctgcttcgttccgacggccatagtaattgtcaacacgaccaccaaacacgccggaatcatagctagaccagtcgcgaccgcataaatgataacctcgctatcaccgcgccagtcattcgacgcagcaaccacaatcgcaaaaataacagcaatggcaaagagcagaagcgccagcttggacagtttccgctgcaaaggtgtaccaacattggtacccaagaaccggccaatggcatcagtggtcgtcaatgtccaagcctggatataccatcgcttcttcgtttcgccttcaggtccacgcttaacagggcgacgtttcgggtcggtaccacggagggcttgcgcgatagctccaatctcggttctcattccagttcccacgacgacaccgcgagcacgtcctcgggtcacggttgacgaactgtaggctatgttcagtctgtcgcctgggcctgtgtcgacctcaaaggtggcctctgcatctttttggactgggagggactcgccagttagcagcgcttcgtcagtttcgaaattgaatgcttcaacgagtctatgaagggttagcttggtattctgatattctatacgggttggtacatacctgacatcagcagggacagtatctcctactttcaattcgaccatgtcaccggggacgatctcatttgctgggacggttgccgtcttgccgtcgcgagaaactacacctgtgggcgaactgagcgatcgcagcgaatccatggtcttctcagcggcgtaatcctgatagacaccgacgacgatgttcagcccgatgacggcggcgatgaaacctccttcgatccaggactggatgccgaaactgacagccattgcgatgatgaggacctagaaattcttagcaatcattctatgatggatcttggcttctgacttaccagcatcatggcgttggcgatctgtcgaatgacaatcttcgccaaggagacgcctttgtctccttgaagcatattctcgccatacttctcgaggcgttgcttgacctccgcagttgttagaccatcgtccgaattggtctggagttcgctgatgacatcttcgaaggtgagactatgggcgggttgggagagaggttgttgtgtaatgtcaacatggctctcggagccggagcctttgtgcgacatttcgcaatatcggatggtagagtgttgtctctagttgggtgggttgagtgaattgagtgaattggtgaaagatgtacttctatgaggctcttaagggggcaacttatagaaggtatctgtaggagaatgagagtccatacaccgggattacttgagtaataggcacacttctatgaaacaaccttcttttcttttcttccgaggggggttctcaaagtataaataggatcagaataccactcgatggcgaaatgcaatcggcagttatgaccggatgtaatctgaaggaaattgtgtccgacatccggggaactagattttatgctggcgaatcaacttcatttaccacatctctgtatcaagcggacgaccttggcgcatcatcgatgacgcaaacggagtctaggcatgtccgggtgggtccccacacgacaattctcgggctctgattggtgcggaaattgcttggcataaccttggctggacaggtcgtcggtttctatctctctggcttatttcccacctctggtcttcttggctcttggcacttagaacctcttggcatttcggggctcgagggttcctccgcttcaaatccgcctctttctccggaggaattcttcaattcttacgtggcgaaacccccattatctttgtttttcgcctcagataatgggctatcaattgctcctggagacacggtgcctgaatacatgattgacccgagtgatccgatctaggttgcactgtcttacattgcgctattcctccattctcattgggtctactatcgggcgatactccaattctttatttttattttcttctcgtatcttcttcgcttgggcctaaaacccatatgaccctccactcatggcggacgattctatgccgcgagaggagatactcggggttgtgattggggcagttgcgctgttttccctgatcagcatgattccggtgtaagtacggaggcgcgagaagtcttggcaacccccgcgcttcatgcatgcgaattgttctcgaacttccgaagtgccgatcactgatttgtatgattttccgtctagcatgatcatgagacatcaccgacgacgcgccgccatacgggccatggccgcagcccgagttctcccaccggtatatcaggtacagttgcagaatgtgttgggccaacctgtgtccgtggaccgatggttggaagaacagaacgtgcctgccaatgcgcaacaatatggccaagatacttggtaagtgcgctattccagcattccaccggtctccgattccggctgcccctcctcgagccttttggccccgcggctggatgatgtcgtgtggggacactagggctgggcattcggtccctccgccctatcgggatccgcgagttttcgtggaggcggatccatggtttctgggcaaggcgttattgcgcccaaggccaatttccggtgttcctggataaacacgcgtggtcttggctagagatagcagaccgtgcaagcgactctggacacatcgactgaatcttctagaatcaagctaactcacccagccccatctgtctgtcagcactatcgtcgtccccatacctcgcctgtcccgatccagccgtgctggctgacgaccagcataatcccaacccgactacacgaccagacccccgctgcagctgcggggcacattccccgcccgatagcgaggtcctcgtactcaatcgctgcaagcatgccttccatctagactgtctgaagtcctggtttgaataccgtcggtataagtgtccgatctgccaagcttcgtattcgccagaggaggaggcacgaggatgatttccagaaataattattgacctgcatgcatgatcctgcggggttgcccaagtgcaacttgcatttggtcagcgatatgccctttgactatcggatcaatacggcttctttcttatatttttctcctttttctttacctcttttgtcttgctttgcttttgagatatccgtcaacgtgacacgacatgtttgttcattccgttctttgatctgcatttatccattgaccatctgtccaaagaggccgcagatgatcttgttttatgtatctatacgcagtcatatatactcgttatgatcgtgatgaaataggctatgtatattgaccgaatggacaccttcctagcctgttttcacagaaatgtatacattaaatcaccatcattgtactctcatcttctcatcgtccgcgattgaacaaccgggcacccaaataggaaatttatctcggcactccgcatttcccgtctctacggagacagcttctaagatattcctttttttaatttccctccacgatacaagaactccatgcataccaaggagtagcatcagaccctcctatcacacacatctcatcaaaaatcaatcaaatccctccaccatgggcttaaatgccaaagaaaccaagctcgtcgatatcgccagagataccatcaacgcaatcccaaggtcaagtacccacagtgtctccagcgcagccctctcaatcagcggccaggttttcaccgccgtgaacgtgttccacttcacgggcggaccatgtgccgagctggtagtcctcggtgtagccgccggagccgggactccgcgcctctcgcatattgtcgctgttggcgaagacggccacgacggaatcatcctcaatccctgtggtcggtgtcgacaggtgctgtatgatttgcatcctggaattcgggttattgtgcagaagggcgggaaggcggaatctgtccttattgatgagttgctaccttatgcttatgagcctagggagtgagatacgatacaattatgtgcataatggagatgccgaagtaaccggtgtggaatatactacggagtggcagtcaagccgatctaaaaatacatttcgacgaactaggctccatagttcactaatagcctgattcaatccaatcagcatagtcgcttcctagaaccgtgtcctttgtgactgccgccgatataggagtctcgtactcgcgcgcagaagtatctgacccggccccgctattgttgtactcataatagagtggtgtggcgccttccgctaatgtcgtccagcccttggcattgactatactacccaggttggagttctggtagatgacgcgagcaaggcctcgccatggacggccaagatagacagtgctatcgaggacagcactagacgcagccttgatattgcagcggtcgagtgcataccaggtggtgtcggtagttgtctggcgcgaactggcagtgatggccccagggccgttggagactatatcgcagttgttgaaccaggcggaggcggcgccgaagatgtagtccacggctcctagaaaccgttagtacttatagtgaaatagggatgtgatagagaatgacttaccctcgatcctgctgttggcgtagtattgtgttcccgacttggcgtacaaagtatcctggtatccactgaactgacacgcatagaagccgagtttatcggcattggcgacgagtctggtatagtcagtcaataattcaataccaaggcaaagaaatagatactcacgcaacagcctgcgcgcctttcccgaacccgttcaccacattgatattgtgcatcttgaacccatcggcgacaacgttcacggtagcgctcgcatccagtgagccagcctcgggcgaagatatcgtatgcgtaatggtaacagtgttctccttatatgactcctcataagtcgtctcgccatacaaagtcagagcaccggcatagttaatagtaagctgttcctcgtacgtgccgcttgcgacatagatacaagctgctgctgaggaagagccgagagcagtaagtgcagcgccgatagtcgagtatttcccactcgatccgactgtcaggcaacctgcgggggcggtggtcctagctgtgcgggtgactagtttggcgggtgcgcccaggaccgccgtgctgagggctgcgaggaggaaagcgtgtagttgcattgagagaaattggtgttttaccggagagaagggaatggtttcgggttatgtactccgtccgtctttatagaagttgtttctccaccgggactttgtatagttatgggacatatttttccgagataaagagagatttcctcttcaaggggccaatatattcaattatatccacagtccaattcctatttgtttcacggagttccaccccgttgcgtagaagtggatattcagggcagatcgtagatcggggagaacaacgtgggaaagtcaccggaggataacccattgggtaattaaagggaatttatggaccctatatctgtttgagggtgaagaaatgactttccctcatggaattattcctcgaatggcgggccagggctaaagaagaggtgtttcaggtggttttatttctccgttgacgaaacattgaaactatccacatgcgaaacacttaataagagattagagaaggtaaaaggagaagagaagttatgaaaggtataaaactagaaacgcagttattccaatcatagctgcgataccataccttcaatcaccacgcaatgtcgataacaaaagccctcgcagtctttgcgcttctcggctcatctctcgccctgccagacaaagcaagacaccacaatgctcgcgcttcatcttgcacaccagtagcaggtggatcttcctcaatcgacgatgttcccgctataacatcagcaatcgcctcgtgcggcaagggaggcactatagtcatcccatctggcacaacctacaacctgaagagcacactggactttgcggggtgtgttgactgtgacttccagttggaaggtaccttgaaattcagctcgtcaacatctacctggaagggacagacagcaatgatcaatatcaagaacattgacggacttcgattccgatctataacaggcagcggagtcatcgacggaaatgggcaagatgcgtacgcattcctttcctttttctttctttttaattctcatcccagtccactaatatcacatgtagatgggacctcttcgcaacagacagcacctacgcccgcccaaccctcctctacatcaccggcggctccaacatcgaggtctcaaacctccgccaaaaaaacccacccaacgtcttcaactccgtcaagggaaacaccaagacggcgaaattcctcaatctaaaaatggacgccacatccaagagcgacaatgagccgaagaacacagacggcttcgacatcggcgccagcacagacgtgaccatcagcaacgtgaacgtgaagaacgacgacgactgcgtggcattcaagcccggtgcagacggcgtcacagtcacggacattacctgcaccggaagccatggactgtcggtggggtcgctggggaagagtgccgaggacgtcgtgaagaatgtgtacgtgtccggcgccacgatggttaattcgaccaaggccgcgggcattaagacgtatcctactggtaatggtcatgccatgtccacagtgagcaatgttacttttactggtgttgtggttgatgggtgtgactatgcgattcagattcagagttgttatggagaggatagtgattactgtgtgctgaatcctggggatgcggacctgacgggcgttgtttttgataagttcagtgggaagacgagtgggaagtataaggctgtcacgggcaatcttgattgtggatctcttggtacttgtgatgtcaaggttagtgcttatactgttgaggcaccatctggggggagtgaggtgttgtgcgctaataccccgtcgactttgggggtaacttgcacggctggtgcctcgggctgagaataaggagatcagacctatgtatagttgagtgaagaaactgaaaagaaagttctatacaattttgcggtatataaaatgtgttcgtcatacatgtgtgatttctagcgcagtacaccagaaatcccgttctaatacttatgaggatgcaatcatcttgtccttcacgtaaaggtcgacatactggtcgacgtcgtagttctccagctgggagcggtcccagcccagcttcagcagctcatcaacacgagccttgtcaaagtgcgcctcgatgtgacgcttgtacttggccagaatctcgggcttggcctcctcgcggcggagacggtggcccagaggagcctcgacaacaacctcctcgaggacagtgccgtcgttcaaggtgacggtcagcgcgttggggatggtgcgcttggtggggtcgtggtagtcggtggtgaacttggggtcctccacacagcggatcttcttgcggagagactctagcagaggggaggtcgcggcctcggagccgtcagcgtagtcgcttgcggtcaggcggccgaagacgagcatggtggcaaccatgtactgcacacagtggtcgcggtcggcgaagttgtccatctccttgaactgcttgtcaatgatgcgaatgcatgcctcgtgtgtgcggttggtgatctccttgatgtccttggcgctcttgcccatggaggcaagcttggcattgaccttttcagcggcctcgatggcagtctgagagtggaactcggcttgaaggagttagttgttgtcaattttgtatagtgtcatttctgcaaatttaaacttaccagggtaggaaaccttgaacagaacgttctccatgacgtaactgccgtaggggcgctggaactggaacttcttgcccttgaacaggacatcgtagaagccccaggtaggagcagtgagaacggtacggagaccaccctcacccctctggaccttgagaaccaggttgacagcgcgctggcaggcgtcaccggcagcccatgacttacgcgacatggtgttgggcgagtgacggtaggtacggagagactggccgtcaacccaagcctgggtaatagcatcggcagtctgcttctcggtaagacccaacatcttggagacgacggcggcggtcgcaaccttgacgaggacaacgtggtcgaggccgaccttgttgaaggagttctccagagccaggacaccctggatctcgtgggccttgatcatggcctccaaaacatcatggatcttcaggatcttgccgttgccgaggtttccgccggcgcggttggtgcgggagatccagtcggccacagccaagataccaccgagattgtctgaggggtgaccccactcggcagcaagccagcagtcattgtagtcgagccagcggatcatagcaccgatgttgaaagcgccattgacggggtccagctggtaaggagtgcccagcacacgggtaccattggggacaacagtaccctccacaacggggccaaggagctttgtgcactccttgaacttcagagcctccaatccacagccaagggtgtctaggaacaccagacgagcagtgtcaaactaaaaatttagaattagtcggtgcttaatctaaccgggccgggtaaacttactgccaagtcggaatccaccttatagtcgtggatgtaactggccatgtcctgaatttcagtgtcataagacttgtcggtgtgcaccgccggggcggcagattgacgagcagccattgtagagaaacggggagtgcgaggcaccgggatacgtggagagatggagagggaagaagtcaaagtgggaaatctggagatgcgggccaaagtgcggggagacgtgtgggtcaggcgtctcactgcgggcaaggacatagtgaagaagggtttggaataggattgttgatcaacaattgacacaattggagagacgaagagggggagatggtcagttatttaaaacaaatcatggacgaaaggagaaatgttggggaaaaaagggagagaaaggccggggatgtgttccaagctgacttcatactgccgagggtcggttacagtcgggtattacttctctctaccctttgtacaggcctttgtatgccttcttactctttgtttatggggttgactaccttgtctacagacggtagactgataattgcactattactttttcaataggccgagttgattgctatgttaccgtcgtttgagcttcctggccaaaatccgaggatcggacataaaaggacagcaacagaccaggatgcaagatgtagcgaacatcggaatatacggtccgaatgtgcaaggaaaggacaagccaaaggagcaaaaatgttgttcgaaggagctcaccccgagctcatctggaccgctgccctcggctgatctgcgagctcacgtgcagatcatcaccccagggggccttccccaatccccaatccccaatccccaattccccaccttttctcttttcctcctttctgtcgtcaccatcactctaggatatcagtggaacattcccatggcctcttctgtatcagttttatacagagacttgacaatctctccatagatagctttggcaaagagcgggggcacggcattcccaatctgcttgcgcatgaatctcccagcgaactggaagtccaggggaaatgtctgcaacagggccatctcacgactggtacagggccgggtacccgaggggtggtagttgtattcgccacctccgcaagtaattgtcctggctagagaatggcgatcaaaagacggtcggtggctcaaagcccaacgcgccagtgccgcttcaacgttgtggtcttcggcatcgggaggaatgttgtcaatcgtggatgaaatggtctcacgcggacgtaaaccgtgaccaggcatgccgtgagtgggttgcgcataatgtggtagagcttcaccgggtctatgaacacgtggttagatatataaaattggagtatgaaaagcatcgtctttcacttaacttaccccgcagcaataagaagcagtctcttccgctcctgaggcactccatattcatcacagcccagcaccgaccagcgaacggaatatccaaactcaaccatgtccaggacaactcgattgaagataacagggaatcgttgcggtaaccccatggtttcctccatggtcaacacccggggacgggactcccgaatcagacttccagccgaaaatacgcacgccgagttagcgtcatcacgaggacagggcacagtatgagcaggggaccaggtttggcacggaggcgagcagtgtgcaatatccactcgcaggaatttcggatcgttggtaagaaaactgaaaaagtcggaatgctcgacctctacatcgtcaaaattcagctgatatgtttctagtgcatgcttatcgatatccacggcccattgtagcttgacgccggcctgcttagccccgcaagacacaccaccagcaccgcagtatgcgtcaccaaaggtgtatgcacgatcagggacagtcaaatcaatcacaccctggcgttcaagatccctagccatggaagacaccctagcctcgccgaaaggcacagtgtggcctctccattctgcacgcagctggttcgcgcgctttccaagtcctggatctgattcggcaaaggtcagccattcaatggcacactgctctgcacttaaaggtgcattaccaggaataatgacgactccattctggcgaatggtgagcttcagtcgacaagtcagttcatctcccggtgtgaggttattgaagtcagtccgatagttggtgaagcgaatggacacaacccgcctaactttcttgatgctgataagatcggtcttctgagtgagccagaccaattcattgttaagttttggcaaatatgtcttggcttcggggtgcgtggtgcggtagagatgccgtccgaaaaaaagcagatcatgaggctgagggatcatgtccttgacacgcaggaaagagccgtcttcaagctccagagatattccgggtttgaacacaacacccccaatatctatttcttgctgcattgtctccggtgttgagctgcagctggcggactggttgctgatgagagatgagttgccagaagaagaccggtcactcgataagtcgtcgccggcgacaatgacggaggcagccccaacgtgtgccatttcagaggtcaattcctcaatggcttgattggtctcatcatcgcaggtgaggtcaatgacgatctgcagtttctcggtgggctggaaggtgtgactggcctcctgcatgggtggagtggtatagatcgccgacggatccaacatgatgatatcttcgtcgagcattgtccgttcatgactgactgctcggaattctgcagtgctcacagggactgggtctccaaagggagacactgaaatacgggatcgatcattgatatcagccatcgatgtgatggttgactgatgaaaatgttccatattcggctcggatgatgctaaatccggaatcttaatgaatgcgaagaagatgaagttcgatttaaaccgatgaatgatcttagagatcttcttgtaaggtctttccggtatggtctcacgttcggatgagttggccttcagaaacacttctatttctatagccggttcagacctaacccgcgcaagtgatcacaactgatttgaaggaatcgcagggtttgccaggccttctatacataacaagtccaactgaagcaacgcaaatttgtctttgtatttctatttggtctacaaagcagagatgatatctagctctgtgcagcatgaaagactggcatagagccatggtattcattttatctcattgaaggtccgcatagctgttccaatctggtttgtatactcatctatggttgtatgtcaatatcaactctatagacgcttagcccgttccggatagtagggcatgcccggggaatgcccgggcacgtgcccataggccattgcttactcatatccccccgaagtcggcccggacgaccacgggagggaagagaaaatttctgtgggcaccgaagaaccacaaccgcaatggaatattttcctccctctctctctctctcttcttggggtggtgttcattttcagtgatcaccattctcttatcttcactccttcttttacgtgatctggtttaggtaagtcgcatgatttcattgttttcagctactttatgcaaagctgcccctctgtctcttgtgatgaattatggtattttatagatgttagacttcctaaacaattgttgcggataaacacctggactgatttgagacacttcaatcttgctatactgtgaatgcgatgtgaacactggtactaattgtcttcgtccattgcagaaaacctactcttcgtcaggatgtgtggtatcattgcgctgatccaggcgaacccctcgtctgcggccgccgtggatctccacgaggcactttaccttctccaacgtgagttccggccagaatatatatacctgcgaccgcgagactaaaggttctggtatcacagatcgtggtcaggatgcagccggtattgcgacatgcgcatccggcggccggatctaccaactcaaggccaacggcatggctgccaaggtcttccaggaaggtgctaaggtttccaacctccccggttccatgggaattggccacctgcgctatccgaccgcaggatccagtgccaacgccgaggcccagccgttctacgtgaacagcccctacggtatctgctttgcgcacaacggtaacctcatcaatgccggagacctccggaagcaccttgaccttgaagcccaccgtcacatcaacaccgacagtgacagcgagctgatgctcaacgtcttcgccgatgagctcagcgagaccaagaaggcccgtgtcaaccacgaggacgtctttgccagcttgagtcgcatgtacaagcgttgcgagggtgggtgggcctgcactgctatgcttgctggtaagttgtgaatcactcctgctgttttctagtctatggccctaactcgcgactaggctttggtatcttgggtttccgtgactcctacggtattcgccccctcattctgggctctcgtcagtccgcggatggacccggcatggactacatgatggcttctgaatcagtggctctggatcaactaggtttctccgaccaccgtgacattaagcccggtgaggcggtcatcatcgccaagggtggtgagccggtcttccgccaggtggctccccagaaggcctatgccccggatattttcgagtatgtctacttcgctcgccccgactccgtcatggacggtatcagtgtgtaccgtagccggcaacgcatgggtgaccgtctcggtgcacggatcctcgaagtcttgggtcccgacgttgtcaaggacattgacgtggtcattcccattcctgaaacggcgactacgtccgcgaccaacgtcgcccaatatcttaacaagccttactgccagggtttcgtcaagaaccgttacgtgttccgcacttttatcatgccggagcagaagacacggcaacgtggtgtccgccgcaagctcaatgccatgaaggctgagttcaagggccgcaacgtcctgttggttgatgacagtattgtgcgtggtactactagtcgcgaaattgtcaacatggcccgggaagccggcgccaagaaggtttaccttgccagttgcgcaccggagatcacacatgctcacatttacggtatcgatctagcctctcctcaggagttggttgcgcacaatcgggactccgcggctatcgccaagcatattggcgcggaagcggttgtcttccaaactctacctgatctgaaggatgcctgtgcttcggttgcccgtgagaatggtcaggaggagcccacaaactttgaggtcggtgtcttcagcggtagctacattacccctgtttcttccggttacttcgagcatctggaggccgtccgtggcgaaggccgcaaggtcaaggctgttgacaaggccaaggaggctgtcaccaatggctgtgccaacatgaccgacttccagattgccgcgcatggagtcactatggacaccaatggcaagatcatccctgccattgacaacgagtcggccattggtgccggcacgcagaccagcaactccgaagaccagcagaaccctaaggtctcggaccgcatggacatcagcatccacaaccaggctgaccatgaggcatgaggcattattacgagacatctgatttccattttttttaaatttctttttctctaccgttctggtaacttgcattgggtatttgggcgtttatttgagggagcatgtttgctgagtggctgatttgctactgtatgatatggaaatgatgctcaaagcattgaaaataccaagacccgatgtcttgagatacacttgtcaataactcttgatgaaacaaaaataaatgcaatattcaatgttgttgaaatgctgttctttcatcgttggctgtcccaaagaggcaggtcacgtgcccgtcgttggccagtagcattccctccgcatcatcgacagacccacgatgcgctcatcggcatgaatcaagcttagccctctgttcggttgaaatgaattgatacgtcttgttatatcgggactcgtatacgttgcttcacttgcaagattgaacgaaattgacgctccttctctatataatggaacgccgcattactcgttctgcagcccgggctgccactgcatggagtgcgggagaaaacagcccgtctgtcactcaaccaccaaacactactaaagggaacaaacgaaagcgtcgaacccccaataaattgaatacacccataattcaaacagtcactgaggtcaaatcctccaatgattccgatcctgcagttaaacaagaaaaaccagtgttgcctcctttgttcgatgagctccctcataacctagggccaatgccggcccctttgtctgtagcaacacagcccacagcttcaattactggatctgacaaggaaaaccaaactttagagggcaaccaaattggcaatccgtctactgagttccaagacaccgtgaacaaagctacaaccaagttgaagaaagaacccaaggttcaaactacccaaagcggccgcaagccaaagaaaaatacttatggcttgacgcccggtatctctcctttccccgaattggttcggcccactgccgaggagtgcgaagatgtcaatcggctgttgtccagtatccatggcgtagtcactgctccagcaaccattcccgagccatccctgacagtcaccgggtgtggtgaagtcccatctgttctggacgctttaatcagaactcttctcagcggtgccaccacgggcaacaacgccgccaaggcctttggtgggcttgtgcaacgatttggcattctttcagaaggcatcggcaagggaagcgtgaattgggatgctgtacggcaggccacagtgaaagacgtgtttgaagcaatcaaaagtggcggattggccgacatcaaaagcaagaacctcaaggcaattcttgacatagtccacgaagacaaccaggcgcgccgagccacattgttagattctgagtccaagaatgactcaatgtccaacctggcgcctgaaaaggctgaaaaggacaagcaatacgagattgcctgcgcagatcagaactttctctctctcaaccacctccacaatctcaccagtgaagaagccatgaccgatctgatcaaataccctggaatcggacccaagacagccgcctgcgtgatcctgttctgcctccagcggccctgtttcgctgtcgacacgcacatcttccgactctgtcgctggctcgggtggatccccgcccgtgcaaacgaagtaaccgccttcagtcacctggaagtgcgcatccccgaccatttgaagtactcgctccaccagctgttcatccggcatgggaagatctgcccccggtgccgagctgctactggccagtccagtgctggctgggtggatggatgtgtcattgatcaccttttaactcgcgacggcaagcgcaagagcaatggtccgactatggtttctaaaaagaaggctcctgctacgagcgcggttggtaagcgcaagagaatgagcaaggactccgaggaggagactgaggaaagcctgagttcgctttccgacggaacaagtgacgagtgaatgcattatgacaacgaaattatgtgaagtcaaggtggaatctttacgaggattgatcgtatcaatctatgacgacgaatggcttaagccgaatatttactctatatgattatatatttaccatattgctataggtctcaattcaagtgtgttattattgctaaacacaaagatcaattccataaatcaagtctgatatttcctagatgatcgctggtctacctatgttgtcgtatagcacaagtaccccttatcgccttatcgtaaacacgaaaagtcaccagaaactccctttactcccaacaacactttccagttgtccaattgcaccaattcccgccatgggctgtctggcatcccacattccgccctcgctgcgcactcttctggaggcctacgcgcctcccgggtcggtagagtacgccccgcacgtcggagtcgcgttgacctcccttctcgccgtgtacgtggggtacctctacatccaaagcttgagagaggcagcggtcgttttcaatgttcctatcccgtccgaaattcgcaatagcaggtcaatcaagacatgggatgaggttcaggggttgcagaaaatagtgttggaggatcaagctcagggagtgagttaatatgcctggtctttcgcttgggatcctttccttgcggtttctttttcttgttcctgcgctaattgcccttccactatacagaaatggaacaatgaattgattgtgagctactgtcctgccgatgggagggtgctcggtaacggaatcaagcccgccacggttgaagatgtcaacgaagttgttcgggttgcgggagctgctcaaccggagtgggcaaagactacctttgcggagcgcagaaaggttctccggacattgctgaagtatgtggattggcatatttgctccgccctatgaaactattgcgctttttctacgtcacccggcgaagcttccaactaacacctcgcagatatgtcctagaccaccaagaagacctcgttaccgcatgctgtctcgattcgggtaaaacaaaagttgacggctcattcggcgagatccttgtgacagtggagaagctcaagtggacaatcgatcatggcgagaaggcactgctgccagagcgccgaccgaccaacttcctgatgatgtacaagaagaacacggtcacatacgaaccgctgggcgtggtgggtgcctgtgtatcctggaactacccgttacataacttcattggaccgatcatcagcgcgctgttcaccggcaacgcagtggttgtcaagccgtctgagcagactgcatggtccgcagtctacttcctcgagatggtgcgcggcgcgctctctagctgtggccactcgcgcgatctggtccagacgctagtctgtctacctaatgttgccgatgcattcacctcgcaccctgatatcgcgcatataaccttcattggatcccggcccgttgcccaccacgtctgcacatcagcagccaagtcactcatccccgtttgtgtcgagctgggcggaaaagaccccgccgtgatcctggacgactcccgcactctccgcaatctcccttccatcgcatctatcctcatgcgcggtgtcttccaatcatccggccagaactgcatcggcgtcgagcgtatcatcgccctccgcaacgcatacgaccgactcatcgaaatcgtaaccccacgcattcaaaatctccacctcggctctgtcctcctcgacaccgcaaccccagacgtcggtgcaatgatctcgccagtatcattcgccaacctcgagaaactcatcaacgaagccgtgcaacaaggcgcacgtctcctcgccggcggcaccgaacacaaacacccagtccaccaacacggccactacttcacaccaaccctgctagtagacgtgacacgcgacatgcggatcgcacaaacagagctcttcgccccagtcttcctaatgatgcgcgccgagtccgttcctgacgcaatcgccatcgcaaactcaacgccatacgcactaggcgcgagcgtcttcggacaccaacaatcggacgtgcaagcctgcgtgtcaagaatctccgccggcatggtagccatcaacgacttcggtgccttttacgccgtgcagctgccgtttggcggcgtgcgcgggtccggatatggccggttcgcgggcgaggagggactccgtggtctgtgcaatatcaaggctgtttgcgttgaccggtttcctacgttgattggcactgggatcccgccacgcgtggactatcctatccagaaccgggcggacgcggcggacgcgaagggtgggattgcggcttgggagatgtgtaagggtattgttgagatggggtatgagttgacgatgggtgggcgtattgctggtattctgcggttgttgaggaatatgtgaggtctgttctttggaattttcaaaaatcttgtttcatatcgatcttttgtactatacatagtccatcttgcttgagtgatatctctagctatgggaatatttgactcaaagtgtattcatacttcacatctatgcatatctagaaatcttgttacttcgccaatctaaaatcagggtataacgctaacaacaaagtcctcataaactcggaacaatttcacggaggaagaggagggccgaacttcttcagccagtgatcctcagttcggaacgaactctccatcatccaattccccaatggttcccggaagggttcaagaacctcatcgacaaagcgcgagccctcgagatccaggatatccaactgaccattacagaacagctgaccagtcgggaaaccatgagcatactcaacctgcgcagggagacgcagcaggaaatccgacaaccagcgcgcaaacttcccattcatctcgttgtaggtatttgggttcgtcctcgcaagttccatattatcgacagtccacttcgtgatctcggatgaccagctaggcaaagactccgcactagcacggaggagagcctcgaagaaagccaagttgaggtgtggcttgtcgcggccgatgcgggtcacagcgaggaagtgctcggatgggatggtatagtagacgccgcggccctggttctctgatttgtagcggcaaaggaactcgtcgattttgaggagggagagcatggcgttgaagttctggtgacggattgcgttctggattccttcgtgcagggctttgcggtcgacttcggtcagggtcgagggcgataattggccctttccatgggtccaattgcacgaggtcatgcgcagcatctccaggaaagcaacgtcttctggagggaaaccgttgctgcggccgcggaggagatggggtgggaatttgcacaggtccagtgcgggcatgttgacggtcaatcctacatccacacattgaagctcagtggtgaccatcggcaggacatggagcgtgtaatcatggatccctgtcgctgcgttcggggccatccggaagaactccgggggcatgcaagcgatttccctcatcggcccgcccttcccatggaatacgcggacgctgtcgtccttacgcgctatgaacttttcaagggcagcccgttcgctttcatccgtcacgataccggcgttgatccagcgacggtagatggtgaggatctgcattgttggaacctggtcgcgcacgcggtccacggtacaccacctgcatttgaagacggcttcctgtaagcgggcgcgctcgtccagtgtgaggggaacgtagtcgagcgggaccatcatgcggtcgataaccttgctgcgggggttttcgagcgcatcgttccagaacgcaagaaggatgagagcgcggtatatgtgttcaccggagagggcgcgcgataggaacggcgaagctcgagggaagttcagattgagcgagtgtaggaagatctgctcgatgatctcaacgggcagggcctctaggagagacaacatcctgcgggaagtatgcgggcgcgagattctaggtgtgggcgaattagaaggacggtcataggggctcgatctcgaccgcgaagaccgagatgagctgctccgaatcgggttcttaaaggtacgacggcgcttcgatttggggatagcggtagaatgcgaacttgcgggcataggcggagccagctttctccgcgtcacgggttcatcttcgcgttttggtgggctcatggagcaattgaacgttcgcactatctggggtacatcgatctgtgagcttgaaccatttctgagccgtgtagggtaattattcagtgttgcagtatgtttttcgcatatcaactctagaaagtatacaactttgcaggccaagtctgtaaccccgtctgattggcggggcagagcccgacaggtgttagggctggccacttgagggctggaaggtcacatggtatcacgtgatggctccccactctgttcctaaatcgggtctagcccgttatcaaatgacgtcaaggtctatcagcaaaagaaaagttgttgaacaagaagaatgtcattccgaagggttcaacatggttaaattagaaatcagacatggagacattttaaaggctagatggcccatttaggatccaccaattgccccacaaagccagccttgtcgaaagattctgcactttggaataatccagccgaaatcaaggaacagcctggtgtcgatgtcgaaatgacggaatgatcgttggactgcccctggtgccttgtgtatccaatttggcgattgcaaactctcactccttttctctcattcctccacaaaccttgaattctgtcatagcttccccaactacgtcaccggcgtctgcaccttctgatctctgacgcctcgcaagacaagcttagttgcatgaacttgtctatcaatcgccctttccggacaccacttacaccacttacgtatctaaacaggaaattatcagtccctgtcttagatgatcaccgttgccattcttatttaaaccaccggtccatctacgttactatcttcaatatgcaccctttcagtgatccaacagtccatacacacgcctcttccagctcagattctactctcagctccaaaccgagataaacatcttcatacaaaacaaccaaacaacaagaaaactttcatcttcaatatgggttgcgtcgtttcttgcgtatgcgaaccacatctgctttctatgagatctcaactaacatactgcctctagatccaaagcgtcttccgcgccatcggtagctgcctcatggctatcgtcaatgccgtcggctccatcttgcacgccatcatcagcggcgtggtcacagtgatcgatgccatcatctcctgtctgacctgcggctcctgtggaagaagtagacgaagtcggcgatcagcagtctgataggaagcagaccatcgtgtctgtgtgcgcctcttgagtccatggggataagagggctggatatgggttctacgattgttatgccagcgcggattttcttttgtcattataccttcttggagtaaataccccatggcgcagtttttcaattgcgaattatgaatcaaattttaggttacgaaatacttcacctctatttacattgctctcttccataaatgatgtgattgtagaagatgtgtgtacgcatggtaagtcttgaagtatgaattcacattggtgagtattattctcaaaagcaagtatatcaactcccatcttctagtggagacgactcgacatatcgcaacaaatcctgctttgcatctgcgggtatatcaccccaacgctcattcaagataacatctgcgaacggatcctcaggtccactcccatagcgccggacaagggaataatgtgaatgctgtaacggccagcgagcagggacacgacaattcgcagcacggaacgatatttgcagcaagcgacgaaaaggctcgatcttgcgctttcggatgagccgatatgtgatacccgatgatcggtccggcctggcctcatcctcgtccaggtaaaagtccgcagaaagcagctgcaagaactcaaactgcgcatctgaccagggcgagcgcaagaccttgtccggaatacggccaggtccaataggcactgcgcacggcagccggaagaggtcgttctcgtggtatatctcgtgtggtttgcggatctgcacagccccaaaatggaaccagattgccactttgcggtcgacagtgcggtcgacagtgcggtcgacagtgcgcgacggggtccgtgaagtgtcctccagctgtgcggggatcaccaaatcgcctttcccgcgccggccgagtacggcccagtcacaggcttctagattttcgaagcgtgggtccagatttgagagcactgcttggtcatccgggtggaagactaggccggcacatttgcgccggatggtatgcgcaacgtactcacgctggcatttccggaacagggggagtgtgcaccaccgacatgccagcaggtcggtctgtagttgttggcgctcttgccagggcaaggcccagaagtccaaaggtgggggtaggaaatccggggtaaagaatccctctcgcgagcctaaattgggactgctgaatgcaagccgaatgagccaggtgtagagcaatggattggacagggcttggctgagacgtggggaggcacgagggaggttcacttcaagactatgaagaaagatcaattgcaggatttccacgggcagtgactccaggcgcgagcacgggtggtcggccaatggatcagacgggcctgagcccatttgcaacgtgcgtctaaaggtgatttgttattatatggcttgtatagctttttcgtagcaagacggtgttcacttgtagaatcacacggtatttttatggtcgtgaagagtcaggaggaagagcagaaacggatatggtttatctcaatggaaacacagtccatatattgactgcagacttcgcataatgttgtcctgtagctcctcgtgactcataggagaggcgcttgacaacgcttccagcgaagtctcgaatgaaaagagcaattgaaaggaaaaacccggcccattgctgggagaggggtagggcccaggggatgtgggtaaactgaggtgagctgcgtgtcttggcaaggtcagcttgagagctcgtcatcaagcgagattctgtatgtggcttaatcgtcagtgcatctaatcagattggaatagattgctgctcagtatttcttgtcagagttgcaaaaagacccgtttttcgcatgatacttagctatatatcctccttcactcaacctgctaagatatatatcggactaacaatgtttattgccttgttttctaaaccaaagcccatttctcgatcaattggtttaatatctggttgaaaagtactagattacagtagaatctattaatgaacgcagaaacgacaaatgtattgtttctatacacatcccaactgctccaccacactatcggaggtatctgaccacacactggctgaatagccgtcttcttggctccaaaagtcatgatcacgtagtgcaatggagcgaggaataaaaaggcggatttgaggccacaagagtccacgcttaaacggcggacagatcgccgaagcgctcctacataagggaatggtataagtatcgaaacagacgcattgttctcagcaagacagtcaacacataccttgtagccagggggcatccacttgcccttggagacgagggaagcggtcttctcgtcgatctcgggctgggcggcggcaacctcgtcctaaaaaagcaagcatgtgagtaatggtcccaattctgcagtctaaagcagataatacgtacgacagtgaggtcctcgaagggacgggcggtctcgatgttctccagggtcttctgcaagttctgcaactcagcctcaaccttacccttggtagcctcggcgttctgaacagcctgggcctcgaaggcgtcaatggccttgagctggcggttgacatcgtaggtagcgggcttgaaggccttgaagtggttctcgagctcgtcgacgatagcctggttcttcaggatgccgcggtagtggctgaagtcaacagtctggggttgctcggagaggacctggaccttgcggcgagcctcgtcattgcgcttcttgaaagcttggagggaggtagcggtctggccgcggaggccgagggaggtcgacaccttgacccagtcgatcttgagagcggcgctgcgctgttttcgggtgaagggagttagcgggagtcatccagacgggttgacaaggaattgtcataacgaggagcaggagcgaaacatacagcagccattgtgacgggtatgatagaggttgggggtggggagaagagaggggagttcaatgtgcagggagttgccgaacgaggagcgaccggaaggtttggattgttcaaatcacgtgatgtccattccgaaatccaccgtgtattgtataggcgacaaattataaagcgatcgtgttaattcttgtaaattacttatagacagcttatatctttgctcactaccaagttcagattgattaattgactcatccgcgggttcaattgttttttgggctaaattgtgtacactatgggcgacaacatgccagatatctccatctggaaagcataacccaagtccctcgtagaaccttaaatagggtcactcgttatatgctgagagccatgatggagttaacgatatcgttgtcgttctcccgaagagccttgacggccttcttgcgggacacgtttgcttgtgccatgaccagctcgatatccttggactcaaggttggtctcatcgacctcctcaccatcatcctcctcgtcctccttcttatcctcggtctcgggggccttgcccttgccgagaatctcctcgtggtcgtgaccggcgtggtcgccggtggcctcggaggcagcgagctgctgggcggcggaagcctgggcctgggagttcaggtcctcaatcttggcctcaccgaagatgctaaaaggtgttagtaaatgtagttcacggatgagcgagtctaattgggttccacgtacatccagcagttgctgttgggggaacggtaaacctcgggctggttaacaacgaagaggatctttaattccaacaattagcatctccatggtcagaatatatcgagttatttcatctcgttggtagcaagtgttgcgcttcatggtcgcaatcacattgtacttggcggggtagaaaatgtcatgacggtcgcatcgggatcacatacgttcttggggcggcggagagtgacacgggtgatgccagggacgagcttcaggccgagcttgccaatggccttgcgggccttcttctcaccacgagagtggatagcgacagcggcaccggcgggaatgttgggctcatcgccagcctcggagccagactcagaggagctctcctcgacggtcttggtgacctcgtcatcgtggatttcttcaacgcggggatcagccatttttgcgatgtaaaagggcctaagatgaatgcgaaaaagagttgattagttgggttggttggttcggcaatgggtgtcagggctggttgaatggtgtgagagcgggcatagtgggagagaatggtcaacccccccacgaatcgcccacaccaagggaagggcggaaactgatgttgaaaagtcgataattcagtcgagtaaacactcatacatacctgagaggtaaatatcaagctgttgggagtggggatggattttgttgaaggtgaaggtgcgtagctgtgcgccagaccgaacccgaaaatcattagcgagcgcgcgcccccagactgccctgcacacattgccctatatggaactacatcaccaattccaaactagattggctaatcatttatagatcccatctagatcaaaataaatatatgaataatacagttaatacagtttgcaggtcattatttacgtatctgctcgttctattctttttgtagagccagaagttcaatattccccgttggggggatataaaaatgagtccagagccagaggtaaaccaaatgacaaaaggcccctttgccgggatatcaaggattttgaatcatttttgctgttcattgatgatgcatacagcgattttgccagagtattaccagcaatggaaacccttccaggacacctccttcaaacccatgcaccgaaacctcgtaaccatctatgacttgttggcagcgcgagccttggcgtgggacttctggacctcgtagcgagcctagagtggtgttagttgaactgcttgtaattcccccagattatcagatcgggtgggcccaggcgcattcatgccagagcgatccccccatttcaagatgtcgaacgtacctgcttgcggaggcgcagaaccttgaagcgctcgaagtcggaaaggttcttgcggcgctcggagcggtcggtgcgctgagcgaaggtgctcttggcccacttgccatcaatctcgttcttagcccaaagcttcttcacgggaccggtaccggcagcacggggaagcttggggatggtgaagtgagtgagggtagcgtgggcgagggggagaacgtgacggggcacgatcttctgctcctcggtggagggaccgtcgaccaggacctgaacaaaaaaatcgcaagtcaatacacattcccagtcttaaagatctccgaaaatcccgagtccttcgatttttgtcacgatttccggattcagagggcgattccacatacacggcggtggtccacgatctcaacgatggcagcaagcttgccttcgaaggggccgctgcggatcagcactaggcggccaacctcaaccagcttccacgaagcgaccttgacatcgatatcggccatggcgaaattctgcgggacgaaaaattcagcgtcgcggctctgtaatatttgtagattgcacactcacggtcgacagggggtatgagtcgagagggggttgtcgaaagagttcaattgtccaagagttgtctcgaaattcggatgtgcccacactcgcaacattctcgcttaaccggccacttgcaggtctagggttctgattaggtcagcatccgcattaacaattatccgagcccgtgcatttatctagtttttttttgccgcagaacttttgttgatctctttaagctacccagctttacaagctccagcctctgatgatgagtctgcgttgctttcagtttcgacaactgctcaaatgtagcatttactaaggtatgctcatatccatattttcccctcgttttccgttcttttccccctcattcctcatatgatgccgtaatttgcgattgacccagtgtctgtgaggccctcgccggggctctctatacagcactgtcggatgatattcaatttcttacatattctgatatggattataactctcacgttatattgtcaatgctattgagagacatcgcgctgactgtttcaagatttaggacatctgccttgatatacaaggacttcttgacaacaccgcatctcttcagctttccacagggtacgttcatacaatcctccattcaacacccccaggtccgatgattagaacattttatcacgcctagatagtaattgagcttctcgctatgaaattacctaactaccaagatctctgagaacctatcaccttgcacattattgcttgttatgctggttgtgacttgtcgctaaccttcaaaagaatataggaacttctgtgtcagtctggcagtttgctgtcttatataccatcgaaatgaacaatatattagaacaacaccttgtccatcagtagttcagttggtaatcttcctaaacatccatggataacttaatttacctcggttcatccatgttgtactccgtaaatagtacatctacaaacacctcggtacaaatgcaagtagttttgattacaataagtcgtgctatatcgttacctcggccgtgcaatgccccagagcaagccatttgtcccttcatgctatgccttcctaccaacctagtctatctctcccaaatagcaaagagcaatccttccttgcccttctcgacctaattatgacgatgcagagccggtagatgccacagatgacggtccctcgcggctgagcacccacatgaaaacgaactgaaccgcgtaggagtatacgaacaagaactgaccgcgtcggttgcgctgggaccgggccacagcctgcatcgaaccggcatgcatggcggagtcggtcgaatcggggagcagcacatatttgagcgagcgaagctagagtttagacattagcaaatgcggaacgaattgaaaagcgataaagtcgtcactcaccaggaagaacgcattggccaaaaatgtgtacgcgaacaccgtccagccaatccagcccctagtctcttgtccggggttgaagatctcagagacaaccatggtgacaatgattccaacaaacttgtagcccgagtacgccagcaaatccagcagctgggagtcattgttgatgctcaaaatgtaagtcgccagcttcaagcagagaatctcaaatgcgatcactgcaatggccgtggtggtgatcgaaccgagaagctctgggtggaaatcgcctcggaatccagccagtaacaccgacagcagaatatatgtgaccagggccatgacgggaatatacatgtccggtgagttcaggtcgtcgcgaggaggcaagaacatggatgagtattgttgctgtatgatttgaccacctggtccagaagttggagccatccgggcttgctgtcgggaccagggtttgtgtcgccaagggaagaggacaaggaccagcttgttcaggacgtaggagttggagacgttaaagtagtgcttgagagcgggtatagagacatagcgattgaactgtagattatctccaggttagctataaacgatagaaatttgtagatgatgcatacgttattttccatgtactcctgtccagccgccattgcgcttttgccgacttggaagcccatctgagccgtgggttcgttcatgaacccgccgaatccgggagtaccatagccaccctgagccggtgacggttggtacgggttaccgccatatccagcactcgggggttgctggggagctggtggtggaggtgagcgcatcatagggacggtcgagacatgttgcgggacggggtgatgaagaggcggcgattgcgcgggtggcggagcgaaagagccccgatacataatgcacctgaatagggaacgaagataggagggaaaatgagcgtggaagttcggtggcgaacgtgtcgtctagatcgtgtgacgggggtttggggaagaagcgaagttgatagcggagggaagtgtttatacgtggctgaagatccaatccgctctgagctccccaacttcgcccgttccgccaccaacaagtcacaccgggctttttttcctcctacatttattatctgcttctcacattcgccgatcaattgccggagatactcgaaatgttggaggcttttgaaattttaaccacatcgggcgtggtgctttggtctaaggcctacgctccggtgggcgcacatgttatcaacagcctgatcaacgatgtcttcatcgaggagaaggtcgtgccgcagaatgctacaactaatgggatctcgccggcatacaagaaggagaaatatacactgaaatggaagagagtcaaggaattcgatttgatcttcgtggtatgtctgtcgcatgcgcatgcgctcgctgcttcgactaactctgggtttatgcaggccgtctaccaatcgctactccaccttggctggatagacaaacttcttgagaacatttcaaccatctttattgatctctacaaggaccaggtgaagggaaaccgcgcgagaatccagacctatcggttcgatcaatactttgaacagcaagttcgggagcttgaagacaacgctggtggattcgtagaagaacatgtgccagagacgggtgaaaagaaagacccgcttgtttcgtcggacaatggaggcccaccgccgccaccggtgcctggcctggtgaaaggtatggaatgacaaaccccagttttagtttcaagcgcatgctgaccatcctaaagcgcagcccagagctgcgctagccggggcgacctctgatgagggtacgccaccagctacaccagaaatttctagatcttcgacccctcagggtcatcttcttacagccaaagccgggcctggaggtcgtggctctcgacgttcccgcaaggctgccaattcgaacgccaacgcatcgtctggtgatgaagcccggaagggaaagcctgtcaagtcccctgtgaagaagatgcgcagatgggatgctagtgggatggcagatgaggatgacggagaaatcctcgattattctgcccccgcggaggaaggagagaccgtcgcccctgcggtggaggctgtctccgaggaggattggggtcgtcgaaccggcaagggccaattcgtgctgaaagagttgggcgaggaagttcaatccatcttggaccaagctgatgctgaaaagtccaaaggtactgcttcgtctggtgtggttggctccgggttcaacgcaattggtggcttcttccgtaacatcgtcggaggaaaggttctgacagaatctgatctcgagaagcctctcaaggcgatggaagaacaccttttgaagaagaatgtcgcccgtgaagctgctgtccggctctgcgagggagttaagcttgagatgattggcaagaagactggcaatttccagagtactgatgccgcattgcatgtggccatggaatcctcgctgcggaagatcctgacaccgacctcttctttggatttgctgcgcgagattaacgctgtggtcgctcccaccaccaagcagcaggcgcctcgtccatatgtcatgtctattgttggcgtcaacggcgttggaaagtcgaccaacctgagcaagatctgctacttcttgcttcaaaacaagtaccgtgttcttattgccgcttgcgatactttccgttccggtgccgtggagcagctccgcgtgcacgctgaccgcttgaaggaactgagcgttcgtgaaaatgcaggcgatgtggagatctaccagaagggctacggcaaggacgcagccaacgttgccaaggatgcagtcgaatacgctgcggccaataagtttgatgtcgtcctgatcgacactgccggtcgtcggcataacgaccagcggctgatgtcgtcgcttgagaagttcgccaagttcgctaacccagacaagattttcatggttggtgaggctctggtcggcacggacagtgtcatgcaggctcgcaacttcaaccaggcatttggcaccggtaggaacttggacggtttcattatcagtaaatgtgacactgtcggcgacatggtgggaacactggtcagcatggtccatgccacgggaattcccattgtgttcctgggcgttggacaacattatggagatctgcgagggctcagtgttccctgggctgttagtctgctgatgaagtagggacgacttgatatcctagtttgttatttctatttcttagctgtatataaatccttactttattacctgcgatcatgttgctatagtctcgtataatgaatcccccaaaaaaaacagaatctctgtacagtcaacttactgatcaaatataaagccacaacctgctaaatttgccatcaaccagccaagtgggcggggcgnnnnnnnnnnnnnnnnnnnnnnnnnnnnnnnnnnnnnnnnnnnnnnnnnnnnnnnnnnnnnnnnnnnnnnnnnnnnnnnnnnnnnnnnnnnnnnnnnnnnnnnnnnnnnnnnnnnnnnnnnnnnnnnnnnnnnnnnnnnnnnnnnnnnnnnnnnnnnnnnnnnnnnnnnnnnnnnnnnnnnnnnnnnnnnnnnnnnnnnnnnnnnnnnnnnnnnnnnnnnnnnnnnnnnnnnnnnnnnnnnnnnnnnnnnnnnnnnnnnnnnnnnnnnnnnnnnnnnnnnnnnnnnnnnnnnnnnnnnnnnnnnnnnnnnnnnnnnnnnnnnnnnnnnnnnnnnnnnnnnnnnnnnnnnnnnnnnnnnnnnnnnnnnnnnnnnnnnnnnnnnnnnnnnnnnnnnnnnnnnnnnnnnnnnnnnnnnnnnnnnnnnnnnnnnnnnnnnnnnnnnnnnnnnnnnnnnnnnnnnnnnnnnnnnnnnnnnnnnnnnnnnnnnnnnnnnnnnnnnnnnnnnnnnnnnnnnnnnnnnnnnnnnnnnnnggccggctggcccaatggcaaggcgcttgactacgaatcaagagattgcaggttcgatccctgcgtcggtcaatactttttgccctcgtggctttctttttgctctattgtcagaggagatgtggttcaactagcggctggttgggtggtatgcagtagggtgtgtggcgatttagtttttgggagtggttgctgagttattaagagcatgaaatgagagatcactatgttcagatatgtttcatatgatcaaggataccgatggtgctggcggaactacatataggaagagtgaaccattgtggatgcagggttgggggatatcaccgaattgccaatatggcacagctatcggtaaatgcaaaccccagggactagaagttgacagctatatatgtcagtggcgatggtggaggtttcaggccgaactacgtatcgttgaatgctaccctatcagtcttgttcaatatgatctagatgagtagctctctgtttgtttatatcgaatcaatcattcttctcttttattcctctcctctgggtgtgctagcacatatcaagtcaagtactttaccatattagaaggaagtgatcattctaacactaccagtggacgcaacgactcgtttgcggatccgagtacgaacaggtcgttagcatgttgatccatccctagccaaaatattattccaactagtataagactctacggcaggacaagctgcttaaggcagagttatatctcgatatagctggtgacgtcttggcgtgtgatcagtacgacagacatcgaaggctataatatcgagtgcgccgacaaaatgtaacttgatcaccaaacagtaatttaaacaagctgtttaggaattgccgccagcagtaaacatacctgcggtaatttagcgaggagtgtgttgcttgataatagtgtgttcgtggtccttctcttaaatataatgcctttgaagaagaagatccgaataatatcagagggctggtagcagacgtcgataattggacagaatttgaaacgtgcccatggccagcggttcctaatagacatcgacgttgtggtctagggaagagaagttgacgctgatctttggaagagtctcgtgacgagaacaatatctttgacagaaagagggtttttcgaaatcgaaataaacgattatcacggtgagtgaaccgggccaagttacagcgaaagaaggatacgtctaggaaattagctgtttatatacatgtgtatcaagtcggggcattgttggattcgccttcacgttcttggattgtcagtggttggcacatgttgtgatcttcttcttaactgactatcttcaagaaatccttacttggccttgggccttcgtccacgattattccttcgcaatgttttgagtatgttaaaatggtgtcacaagtagccatttcagtggctctattaccgtcatttggtgctgtggtgtaatatatagagttaaggtacatgataaagcaaggggcgccatgtttcgagtcgtataatgtgtattttgggtaatatgttgacgatatatgtgtctgcgttactgatttacatacgtatcccttaagagaggctataagagctaatggtaattatatggatgccattggcgctatgcatacaaggggtgtttccagttatatattctggggattatggcgaatcctacaaatcacatcagtatgatgcctacataggtgggcccacctaataaactgtatgatcctgactgctatagcgggtcctgtcttttccccgtaaatatccttgattttactgacttggtcttggatagaaggaaatcaagttatagctgctggaataacttgttgagcctcggcactaacgcattgtaacacaagatcgacacatgcaagggctatgaacatataagccaataaggaatcgacaagcctcatgcacctgggcaggtaaatcaaatgaataattgtcctccgtaccactacccagttaactagttagctccccaggtgctcgctctgctcgctctagggctgcccaggtgcctagatcaaatgactcagcatagatctgcaacatcgcttacatcatcattgtgtttctccagggcttgatccggcctgagatcttttgcagccaacttcaaccatccaaagcttctccgcaatttttgtttctcgacctagccctgcatctacaaatttgtcctcttggctaggcaaatattccatccgcgcaggttgaaacttataccaagaagctctcgcacgacattgcgtctacaaccagactttcagcacgaccccaagcgcatggttagctgtgacaagtcttcattcaatatttattttgctggcgtgtcgccagaatgacgggtccagacctggcttcgctcaatcgccgctcctccacgcagcattaccacaccttcgatactccgccgcccaagtcccgtgggcgacctaactcgggccagtccgagtcctctggggatggctcacacgatacccacaatgagatcgctattcccccaccaaaggcatcaccgctgccgaagaggcaaatggcagtgctagcgataatagcactggcggagcaaacggcgttgaactcgatcagtccatacctcccggacatggcttcgacattccccgaggtggaatcgacccaggtgggcgtatacgtgggcagcattgcatcggcctttgcgctggctcagtttagcacaaactatttctggggctggctttcggaccgtgttggtcgcaagccagtgatcctgcttggcacctttctgactgcgctatgtttccttgcattcggattctgcaagactcttgtacaagctattgttgtgcaggcgttgatgggtgtggtaaatggaaaccagggtttggtgtccacctgtctcggagaaatcaccgaccgtcgcaatcaatcccaggcttttacctacctcccggtgttgtacggaattggaggtataacgggaccactcctaggaggactgctcgtttttgagaccaacccttttactggcaacaaaaatccgtatccctatctcgcgccaaatatagtgtccgctgttatccttctggtggactttgttctcacagctattttcctggaagagagcctcgaagatgcagacagtcttccaaagatcggcaaaaaggtgcgcagcttgttcgcatggctatggcagttcactggcaattcccgtcacccgacctatgtggaggtccctcaagaaccgatacacccccacaaccaccgcgattcagaaaccgagggtcatgacagtgatctagattctgcgtctgagatgtcaagcatccttggccactcagaggaactcagttgggatgagatattcactcgtgatacactcttacttcttttgacatacctgatctttgctctctgcaacgtgtctttcaactcgttgttcccaatattcgcgcaagccaagcctccggccggaaggtcgctcaccccgtccgagatcggccttgctcaaggctttgctggaatcgtgacgattattttccaaatctgtatcttcaaccgtctgcgagacaagatgggcaatcgatggtcttaccgcgcaggcctatttggctttgttgtctcgttcatcctgatgcccttcattgggtataagagcaagtctagcgaagggttgactggcaagtccgccatcatggccaccgagctctgccttgtgttgctggtcaagaccatcgcctccgtgggtggtctgaccagcgctctgcttctggtaagaacttacgatatgcctctttcgataaacccaagctaataattttcctaggtcacaaactcggcacctaaccatgccgtcctcggtgccttgaatggccttgcacagactctctccgcagccggacgtgcagtgggcccattcctctccggcggactgttctccctcaccgccaagttgcagcctaaaggagaggctgtggcattcggagttttcggtgcggtctcctttatcggcttcatattgagcttcggcatccgtggccgttcacttgaggcagagggctggggcgaggacagcgatgcaggaaagtcggatgacgaggagccgagcggtgtatgattagaatacacgaacctataaaatgtgccgacatgacgatgtgacgagtttatgctttcgttccagcctgcttttgcatttgaatatacattagcccccgtttcttttatgatagatattgctgttgctgttacattacttgctgaaacaaaaccgggtgttcgattagaccttgagcctgaaggttttattcgagatattgccatgaccccgacgaataatactattcaattactggggtttcgagatacttaaacttccctttatgggtagattaaagccgagtgaagagataaaaggggaatgtctactattgtagtaagctaggctgggtggctgaaacagatatctccttttttgcaaaacattggaatttgttctctgctcatacggacataaacaacaagattttggtaaccagacagcactaaacataattcgaaactggatagagaaatttgagttgaaggagtgttgaaacgaaagagaactcgaaattgaaagataaacaagggtatatggtatatagcacataacgatcgtgacagtaaatcgtggaaaattagcgtgaaggagatgccaaaaaaactaaacagacaaaccaagcagtgaaaaacaaacgaatcaagcccagcgccagcccgactcttgtggcttttgacgcttgataacatccgacagcggggtattgccttgaccaaggggattgcgctgatttttttcccgttgacgctgaagcaaccgcacagcagcagaagcatcaatcccttcaccagtgtcggtaatcttaagagcccacttagcatcttgcgtattaaagccaagctcattgaccatcatatcgatggcgcggtcaacagggtccagaacctgcggccgcagaggcagaggcatcatagccggcggaggagtataaaacgcagcaaagccagtagtatgatcggacgaatgagtcggggtatgaggagcagtcccagcagtcgaggtcgaggacctgtcaagaacgagcgcaggcacagacggaataggccggtgatctcggatcgacccgttgagattatggacaatagtgctgaactccgacatggggcgttcagcagagaaagaaaagcggcctgtggtatcgggatcgaaaccgcgcttacggcggcgacggagctcgtgggcgaatccggcttgacgctcgcggatctcgcggtcattttcgatagggcttgttctttgcgggctgagttcggtcgggctgtcgagggcgcgttcttggagctcgtaggcgcgcgagactgcttctttcaggaatgaggagcgacttgcttcggtttcggttggttcccacttcgcgagaccgattgacttcgcctttgtgaatgtggccgcggtggtgtcggctgggcagaccgagctgagggttaagacggcgcctagaccgagagtgagaatgtaggaagtccattcctctatacttgagagttagccgtgcttaatatgagagtttggtttcgcttaccgagaacggtctcctcgcgagccagatcaccctctgggacgttcatgccatcgaaaatgccgaccttgcgagcttcaatgcattttccatgcagcggctgcaacagaacacccatgcacgtccagatctccgtcagatcgtacatctgtttctgcgatagaccggaaagattcccacgaccgaatccctcaggcggttcaaacaaaacattattcatagcgaaaggctgtgtcatcgtcgaagccgaggtgaagtgattcttcgcctggacaccacccttcaaccagtccatttggccagcgatatcattctcccgccccttcccactgccgaaaatccgacagaaggtccagagccgccagaacgcatcgtcgacttcttcagcgcgggtgttatccacacccgccagaccgcgaatggtatcgcgacgcaggaacggcgagcatcgcgcaaggaccaacgccttcagcttggcaagggtgtatatatcctgcgcgtacctctgcagatatagcgtgggcgtgtattccggaacctgggagtcgggatttagaaggagctgccactccatttcccacggcggactcatctcacgcatttcccaagcgggcggggacattttgaacagggcgttttttagcatgggcagctcgcggcctttgaacgcggtgtagatctttttgttcacgagggcgaagttgaaaaggtcatctagagagtcgatgttctgcataattgacagaatcaaatccaccggcatatcctcggggagtgggatattgactggagcattgcgcttgacgttgggagggagcgcggatgaaggagacgggggagtcgcggggagttcatagatctgttcggcgagttggacgctgcttgcctgcgcagtcgagaccagggcccaactctgacgaattttggaggctatgggcttctctagtttcacctccatggcgagaggggacaacagcgcttgttcgacttgatcgaagggattcccgggattcgtttgcagacgaggcaattgaagtagcaggctgtcgcgcgtggggggcagatcgaggggatcaacagaacgcgattccaatgtcatgagagagtcctccgaccgtgagctgacgctaactgcatcgctgggcgtttgcatttgcttgcgaaaggccaggaaggatttcttggattttgcttttttgatttcctttgtgtcgggcttttcgttaatctccttttcctccctgcccgatcgacgggccttgtccttcccctcaagtttgtggcttttttctttgcttagactcgaacccctcgatatgatcgtattcacccgactgttcttcgccgccttcccttgcggtgtctgtgagtgaggcttcgtggagggggggaggggcgcgggccggctagcaatcaagtccccattatgccggctgatctgcagcggcccgtcaaggatcagcgtcttgcgagatgaatcctggtcattcaggcccgcaagggtatcttcgagttcctcggcggcctgcgacaatgttgggacatgacgagtgcgatgactagcgagatctgaccgttgactatgatgctgcggctgagcctgactgcgtccgcatatatggcatggatggtcggattgccggtgggtattcaactggtgtaacatggaatgcttccagtcgtcatggctcaccgtagattgtcgcaacgagaacagcgagtctctcatggagaattgccttgaccactgtgacttgcgtggtgagactaccgaaaggggggagtcgggccgacttgagactgaactgggaccgaagaatggctctagtggcaagggcttgttcctgtggtcgttcattgatgcatttttagtgctggggattgggaagccgaggtttgacacgtgcaggtggcagggcgaggaaggccgcgaggaacatatggagtgggtatcgtcgaagaccccggcggcgacgggggaatagatcgagtatgcatcggcggttttatacgggtatcgtccatcatctccccagaatgtgctgccgacactggtcaccgaactgcgatggctatagcacgacgaagcacaatccaaagtctcatcagtcccagaagacgagagggtgatatccagtcgatcggcagatccatatgcatcgcaagcgaagccttcagagcgatataaagtatgcactcgttcttctagttcccgttcgaaaaaagagggccccgtcgagcggtccatattgaaatcagcgctggccggggagacaacggagaagtgtgaggacagctctggaaagaagcgggccaagcgggaaactgaacgcaatggagggagatggtccgacaatggagaaatttcagaatcgtcttgggaatcctggggtgattccaagtcaatcatagcgcccaaagattcctgcggggaggcagactgggtgtccccgaggcactcgcttgtggtgtattcttctttgagacccaagtggtgtgatttgcctcgggtatcttcactatcggatgccgtatgtgtcgagggggcctctggaactgctccagacgggccatgggtggtatccgcaatctgcactggcattgtctgtaggtctttgttgactgtcggactcgatcgatctgaaacagtggcccggactatgactcgagtttccagaccgaagggttttcttcgaagcttcaatgatagaggacgaaagactatttttttctgattggaggtcttagtcctttgatttgagggatgacgacgccgagaaggtgacattgacaggcaataagtcatatctcagctctttttctgtatcttgattcatggggcattgttggcccgaataggctgctcttgccctttgttagcatgtcacgatgttacttcaagtccccaatcatctgtcaattgcgttagaacataccttaagtccgaattttggtggaagcagactcgtggaggcgttctttgtagaaaatgattcgtctcggctgtggctgcgtagaacaaagaccagaacccaaatgttttttgtctgatcttgcaagtataggagtttgcaaagaggaaatagcaaagaagctcggaatgggaattattctctaataccgcatgacacaggcacagaccggttgatatcgtctcgaaatcagcaagtcctacggagtacaagggtctgtctgtacggagagtatggagtttctcaaaatgacatcccagccgaataagcagaccgtcatgattagtctgtcgattattggcttagtgtgctgcagctacgcagcgataccctggggtcaaaagatcaccccaatccccaattgagtaagtcgttagatgaggagtaaaagtgttgattcaattcttactagaatagctatttctatagccatagttgcatcgagcttcgtgttcatccgtactcacggcgcagtgagtttacgccccaatgataggcggtaaattgtaatacatccacaacatactgagtatatgcatgattgtccggttccccaatgaccgtgaatagctggagctgtttcggatgtacatcgtattatagtggccccagttttccgcatatggagaagaccctcccttgccgcgtggggtccaatttaaaactgacatcctatatgaatatcgcccttacgtagggcttggacttggatgatttgcgcatgcacgaaagtagctcgagtccacatcccctgcaagtgttttccccatcgtcgccttgctttcacagtagaaaaactcgcccaccaaacttgaaagcaattctagactcctggtgccaccgatgatatgtaatatgaacaccgatgaagagcccgaggaggatctagtgggacaagatactcggtagagatcctcgtaatctcgcccgctttgaccttgtttggactatctaggcaagttactcggcgatcttgcccagtgcgttaacctaaggcttctctgcgagatttgtctttcaaacatgataccccagagtggtaggactaagccacgaatgttaatgtttcacgagcggggtgttgctaaatatattcagggctaagcatttcaggaacgagaagtctagaagtgtagaagaagtagatgtgaaatacgagaacatggaatattgccatgacactactaataatagcacaggaggggctgcttttagtgctgacttgtatcttgatgtctcatgtctcttatacgaacatttttcgtctcaagggtctatacagctattcatttatctctaaaggtaatatttcatctgcaggtctctgcaatagtattttttgtccttctttgtcgaacttagaggcagattgctatcaaattccgtacgaatcttctttatgcaatttagtatctggtacacacatggcagtgcttaagcaaataaaactaagaccagagattatgggcagctaggtagacctctcccatatgtaagaagcaaaacagaaaataattcacttcagttttcatctaaaaaccacaaaatcttgcaatttctgggccgtgaaatctctttgttctacggctttaagctacctcttcctcgtcgagtccttgactctttttgatcgccatgagaaatgtgtgattgggttatgcgttattgttgaataatgtctgggctcaatatttcagttcaaatgtatggatatgaacttatcactagaacaagttagttcttcgactatttgttcatttgtgctcttagaaccatcctcgcctaccctttcaggagggattcatgttgctccttacccaataactacgcctgaatctatatttatcttctttgcttcctgtgatcaaagaaaaatgcagaggattgtcacatactaccatccctaaaggttggagagatgaaaaagatataaactagctgtgtgtcaacggcttcacaaacctcataaaatctacaatacaccctgtcagtatcatggtcggttttgacgaagaaatgctggactcttggggtccagcagtttggggagtcatcttcgaccgattgcaaagcggaaatgtcaaaggtggtacgcttcaggttgcctggccaagcaacgtcgacaggaaaacagcagcccagcaaatccaatgggccaccaagttgcctctcgcccacctccctcaaaaggcactcgatataatatttgacaaaatggttggtttctcagtgggggttcgatatatggaagaaaagaagatccacgctatgcatggactcctaaaacacaacggaccactcaaagcgagtgtggaaaaatggttcagacggccggggaccgtcgaaaaatggaggggtttgatccggtcttacaagagttacgaagatgcaatgggacacttgtcggattgcactacgttcccaagagaaaccgataatcatccattcaagacccaccctgcatacaatgccgcaatgcaatgctcttcctgcttggagttcctggttcatttcgggatcgtcacgcccaatggctatgacttatcaggaagaagctggatcgaggcaggattgaatagtcctaatatggatctgctcacctaccttgtcagcaatgcagatcctcagcatctgatcaaacccagagatatcagagaaacccacgaaaaccacatccttctctcactcgtcggtgtcggcgcattttctcaattcgtgattgccctgaacaggctacgccaggcaaaactcgtgccggtcgacgaactccgcaaaatcttccacgaagcagcgatgcatgagttctgcgctgtcgcccccgtcgccgtggcagaagcactctaccaacacggaatcaacatcggcaacgtcgagcaccagtaccacgaactcggcggacagctagaatcctcctggcacatcgccgcagccttcaaccccgccggagctgagttcatggcctggctcgaaaaattctccatgctcaacgccgaggtccgaaactcagaaaacatgaacccgttaatgtacgccgcgtgcttcgacgagccagcctcaatcgattggctctgccagaaatgcgatcccatgcagcccagattaaccggaggcgcgcaggggtacgccttgatctgcgcagctcgaagctcacacctccacagcggcgagatattctctatcatcatctcccacctacccgataagctattcaccaatgaatacggcaaaatcttcggcacagagatcgccgaaggactagcatcacacaagcgcaagctcgccgacggccgagtccgcgaccccacgcagaacgtgatggagctgctcgccgtgcgcaagatgcaagcgctcgtccgccgtctgtctaatcactggactgggagtcaatggcatttggctctggatgcattcatacgcgataatgatctggggatcctcaggcacagtatcggtacaggcacgcgtctgcttcggagcagctcgcgggatggctcgcgcaaccgccgtaatgtacgctatcccaagagccctcagctaagcagtatttcggaacatgaggtgttgccgagggagaatggtaatgggtcggatcctgctctcgcggatgctattaggaggaataggcctagtcgtgttactgctcgcagtggcggcagacagactcttggtcctatcagggattctagcaatatggtcactaagaatgtgggtaggatgggatcgaatcgccgaatttgagatgttgtgtagcggcctggcgctgaagcatcgaaacacgcttctgcgtgtgatgttatttttcatttcgttgctttatgttgagtttttacattgttgttgatgttctgattcgaattcctatcgtactgtcaaaacccagtatagataccgttatttttcacgttacagcatgatcatgtgaccttttgtgcgtttttgattactaagtttgtccgtcatccatggattttcggaccgattgtttttagtttcttctcacattatcgaatcagatcattgtctattgcgtaacctctcttattcaaattaatatgatgatatatccctctagatgtcagtccaatcattagataaacaggttgaccaaaacaaaggatgagattcggacaatctaccagtcaagtgcacttgaagcaccgctctgcgatccaccgctaacacaatctagctctttgcaaactgttgccaattagtaaacagtgaggtaactggaaataaaatactcacgttggtctgccttttggaatagagtgcttccttctggcttgtgcatggctgggaggatccgacccccttcgatccgttcgagctttgtgtgctcctggagtcgacataagatttgacgtgtgtctgattaattgagttagacaatagaaaggaagttcatatccaagatccatacctgtgttatttaactcgcccgaagacctagttaaaataagaattagcgacaggtcttgttggataatagcttgaagtacccacccttgcttagtagagatagattgatattcaacctcaatctctctaatcaaattcttcgtcacactctgtgatacttcggatattttctgaatttcaggtttattgacagcgcagtgggcgaagaggtcgtagcgaatattcgtcttcgactcagaggcgggaaagaaggaaagggcaagacataaacccgcatcctgaaatgaataaataagtgtaatcgggaataaggaacacttttccagactactcttccccgtcatagccctgaaaagcttcatggcgggagatggcctcgatacttcagacattctctgatgtagctcgctggtataggtatcgaggtgacgagatcgagctattaaagtgtcagctattttctctaataattctgacatcagttgcttacttccagccttccaattgaagtctcccgacaaagtcagaccagaaacccaagtagatttccctctaagaccagccaatccactcaaagccgaagccacaccgtcaaatacagccggctcaccagaattgagattcacaaagatcaacccttgatcagtggtatgagtatgaacctcaaatagactattctgcgacttatcaaacccaggaacatcatcaaactgaggagccttcaccagccgaccagtggtatcatagctccagccgtgataacgacaaccaagaacagtcgaggcaccagtttctttcctggtaatagtatacgcacgatggcgacacacattatgaaacgcgcggatcttgtcgtccttaccgcgaatgagaaacaccgggaacccggcgatctcgaaagattgatatgagccaggcttataaaactgggagatatgggcaatatagagccatgtctagaatgcgcattagcgaagctgttcagtgatgttgttttggaatttctattacttggctgaagagcgcacgccgttcgagctcgaagacttcccgaccgctccaccatccttctgggatttcgggttctttggaaacggtcaaatctgagttatctagcggggtgattgcaatagatttggtgactttatcggcttttggttgagataaatggggccatgttcggtggagtagaaagataagtgtcacgacggccacgaggatggaggttagagatgttaggtagtctgtatcggtggaatccatgataaataaaggattgctgttctgaatgttagaaagtggttggcatgccctgatatactgtcactgggaggtttacatgttacccctccacacattacactctccacagttagcgcagatgcctccattacccgattggattggaatttcctggctgtatcactcagatgacttgtcatttgatcccgtatggttgggattattgttatcatacggtgagtactgtgcaaggcattaagatatagttgcattcacattcatatctcatatctcatcaaaatagcgatcattatattcctgcgatactacgctgccatttgaaccatggagggcgcgacatgctcctccagtcctgactctttcgctgccttggcagtcctgtcaaactcatgctgctcgcagaccatatcaaacacccgtctctggtagtctaagggaaatatgtgtgttagcattattgcatgaactaattttaaaagccacaactccaactcacaagacacgccattctccttgtttgggttcagaattccctcgtgataaacccccctagccagattgctctgggccttctcgcagagctcgaagtcttccatagccacttggcgcacgaatttgaagtattcttcgaacttgtctccagattcaagatggaagtagtcaaattccatccgggtgacctgcgggtcagcggtcgggcatactctgaagcaggacatgccaccaccatagacattcagcgtgcagttgggaaagaagtacaggaatagaccgtcatctgacttatttgggtctgcgatatgctgcgagaaattgtgcttgttgcgcacggtgtagaaggtcggcggatagtatttggagaaagacgggtgagtgtattggcagtgtagacactcttgatatccgtcgaccctgacgaaagttaataataacacagtagaaaagggtaaggtagaatattacatggtcttccagttaaaccggccttcatagttgatgctccgacggtgcggtagtttagtgaagtcgactttaccgagcagctcctcgagctctgggaagaattcatggaaactaggagcatcgtcggagatagttgagaagaggagtccagtgggggtgagatgactgcgcagttctttaccctgtagatagcagtgtttagaagggacttcacatttcatctggatcacacgtacggttttcgcgcagacaaccttcagctcctcatccacggggttcagagtctcccctgaagtgcgaacagcggagacagaccgctgcgcaatctcgtatgaaacatgctcgcccacaacctggaatctggtgactgggccgagcaagtaccaggactggagcatatcttagtcttcttcaactgccagaactgagaagactatgttacatactttgagaaagacagcccgccgctccatctgatataacggctggctgcagtaccaggaggcaggcaaagtgcgaacaagctcggacatgataccgataaaattagccagtggattcaaatttcagataaagacgattggagtggattgcgacagtgacagcgaaagagacggatttttatatcgctatagattattttctttcaatagttttatcgatctggattgagagaaatgctttttttgttggcaataaggttgtccaaccttgagtgctggacagatgcggtatatcgtttcccaaacgagttatcgagtcccgtcgatgtcacgcttgatcacatggcacacgcagatctgagatgttctagccgtgtaaggccctaaagatagacataatcttttcagggtcctgggacttttgtgagctgagtcaaaggatctacgacggcatataccatacccaagtaggcatttttagcctgtatgtgctcaagctagattttcaagatgaatgatattgagagaattagtaaactgaaacgttttacaaaaatgcccgatagcaaaagttgctccaagcatttgtggtcctatgtacttgacttcctcctttggtttcctagaccttgcagctttttgctcactgagcacgctctcagctttcaaattaggggtttctcttggctagttaaggggaaatataagacataatgggggattaaggaaataattttgtgttccaaacccctcggttttggatctaggaatctgctatctaataatcaacgcgccccgcacagcccggaaagtaacgatctctggcagactgatatagttcatatagttcggaccctctaaagtatttgattcggcaacattattccacacgctctggtcgtgttcatccacctagataatcttgatcataccagtagtaatcgcctcatgcataaataattcataaatcggcaaagtcagcagaattatgcgcataattagtgtgtttgccttgtttgtacttcatttagaccagctcaggtcattttcgctttatgttgtacgcacaatttctttgcgtatatttaaagaaagagagaaaccacaaagctgcttaatacagatcttttgtttgagatatatatgcaaatacaatattggtgccaacctaatatcccctgcgcggctcggatatgatcctgcccgttgaataccgccattgtagcatatcgctaattttactctgtcctgaagagctaaccaatgagagtacaatttctagacagtttctcctagcagacctaacgaggtactctatttcaaggggatgacgagtaacattgatggattttacgaaaaccatactggcatataaaggaaaagaaatacggcacatgtgcgtatagaatgcatggaaaacatgtttccgcagcctttgttgaatatcgagaaaaccaaaatgctatagtgatatttcacgcagcatggcatgaccaagcgcccctttgattgacgggcgacgtagagaattcctgataggtttttgtcctttggcgccctgtctagcaagcgaatcatacgtagcctgcccgtatggtactgccgtatcatgttgcttatcaggataggctgtagattcagctataatattgagttgatcatagtgtttcatcatacattgcgccaatcgataatcaataccggtagagtatcaagcgaccgctgctgggctggtatgactactatttcaccatttgagctaacatatagtcggtagccaataccagccccattgagaaaccgtaagaaactctccagagcggcttgatctaggtcacatggtaccatgatcgttgtagcggctacaaagccaatcaacagaaggagcaaaaggacgcaaaattggcgcatgttgaaaaaaaggtatgattggaaaatgtaaggtttcttgtatgatatgcttgggattaggtagaagtctcggggaggatttacagaagataatcgccttgctatttactagacctgcatgaaaacattctgtcgaccaggaaggcccactttctatatcgtcgttttgcttccttgttttgtgtactcagtcatttaccaccttgccgtgattatagagcatatagtagtaggatataatgaataactacttggaatgtgctcatgtaaacaggtactacatatagaaatgattgcttcgctgcactcttcactcgacgttgaaatttccgtagtctgaagtcctggctatctgaccctttgccaagaggatccccttctccagatgctgttaaactgaaatggcgattttgcccgaaaacccacgattgtcctcacattattggtcgttcatcgacgctaccgaccttgttagcactagtcggtgtagtggattgggggcatttgatcgctgcctaatatcgtggaatcttgagaaagccttcggaagaaccctatacccgcaagcctatgtgatatactaagtaggtcttggtcgtaaggccatttatattgtaggctgggttttctttgcgttgcaatcgagtcggtattcacctgaacggttcttcttgcaatttgactactggctggagaaaccacatcttacgagtcatgaggagacatcagatcgattggaagatgataaattgctgaccgctcattctggaccaccgtcctgaagtattttgcgggatattctaggtcagcaaaacacagcagccccgatgcactccacgcgagtcagactttcgaatgatctcacgtcattgtctttccgatagctgaaaacccctctctgtttgttgagagcttaacgctatgcggaacataccgaagtagttatataagtgacccctcccccgatactttgatcccaacagatcatatgagagccattttttctgatcatacattttttttgctattcaacatgcgccagtttctcggcggccttttgctccttctgttggttggctttgtggccacttcacatgcagtgcctagtagtgcaggtgtcacaatcatcatgggaccaagagacctaaatcaagccgctatagagagcttcttacgtgcctcgatgggacttgtttgactaccgaatatatgttaccccaggtggtgaatagtagtcataccagcctagcagcggtcgcttgatactaccggtattggttatcaattggcgcaatgtatgatgaaacacaaatgaaacattgggtcgtcatcaatcaaagaggagcttgatcatgccacatgtcacgttgcattactatggtcatctcgaaaaggctgcggaagtcatgatttagatgcatactatacgcgggcgtgttatagtcatccttcttcatatgccggtgtacgctatgaaaactccagcaacaataaatagctgcacatgtttatatgtctttttgtctccatcaagctttagagagcttgatggtagttagatcatcaccggcatttcttattacatctgttgatcattttctctgtcactcagatatctgcgagcaacttggaccacatactacacatataccctatacttttctcacaagaaattagagaaccaataggatgagaagtaactatacgaatggaggccaatgtacataaagaaggcatgatcggccaatcacgatacgtattagccatcacgtgatccattagacagaggaaatatggtgagagctacatagagttaagaagtacactataaccacccaaaaagaccaggaatgaaatacaattggaacggaaactgcaagatatagagagagactgatatttatttattctatttccctctgttgaggttcaaaatgaattcagctgcctagaggatccgagagtggccaccgaaggcgaaagagcaaaatagaagaagagagagattaattcagcttcctcaattccagaaatcaaacatttcaccaaaacgccaacgatccaaagagccagaagaaagagaagagtgaaagaagcatcacctaactaactataagagagatcagacgatccgtatctcttatcgggcaattacgtcgtcaacttccgccgacttgaaaggttggaactcaacaccttcagagccctgaaccttccatgatggccccgatcaaatatactcctcctcctaccccctcacctccagcgtcttgctacgccatgagtgacgacgaagaagatgaatacaacaccatcgcccaggctgcctcgaatagaggggtcaagctgctcttctccaaaagcaaagtatgacaatttccaacaaggaggaataccaatctaacaataatccaggtctatattcatccaacttcctctgccaaagacaatatccctggctttatcgccctcatccagcaaaaacctctccccgcatcacatgcatccgcgactcatttcaaaaaccccgatacaccctcctatctcctcgcatgggtcccagagtcctcccttggagaagcttatgatacatacgtgaaagtagacctctcggaaggtgactcttcgccgcgccagaagtacttggttccgccgcttccgaccaccaccacctacaaagaccccatcggactgtattcttttgcagttccgctatcacagatatactcgcttttagtacgaccaccgagcattggatggtggtttggaagtttagtgatcaacacccgagcgggcgatggcttccccgcgctatttttccatgacgacgaatgcgagtccaccatcttacaaaagaggaagagggtcaaggaaaccttcgatccatttggcaaggaagggggtttgttttggggcggcgatgaggtactgcgctggttacggaagtatgcggaggtgcagcgctcctcggtagacaggaacgtctacctcgttaacccgtcggatgaggaccagctgtctttcggccagctggtgacccatggcgacaaatccatcccagggcagacacagcccgaagccggggcttccgccggatcccgagccgaacagcctgatgccagcatggatccattcatgaagaccctcaaggagacacggtggaaagtgctggagcagctcagcaaaatcacgacctttacccgtcggactgccaatgatatagtcgataaccctctcataccgcctcagatgcgccgtcttttgaaaaacccagagatccagacgttgcaagatgagttcgacagcgccagggtctatctggctcgttgggcgatgagtgttgccgagcagagcgacaaagaccgaaaccagcgtatatggaccgcgcaggatatgctggaaatggagaatagctcggttggcgactttgagatcttagagctggagaccgggaacctggctatccaggagcgacgccgtgttctccaactggaagaatgggagggcttcttcgacccgagctcgggtagactccaagtcacagtggaggaaattaaagagcggatcttccatggcggcttggatcccaatgatggcgtcagaaaggaggcatggctcttccttctcggtgtttattcgtgggatagcagccacgaggagcgtcaagcaatgatgaactccaagcgcgatgagtacatccggctgaaagcaggctggtgggagcgaatggtcgagggcaactcaacggccgagcagtttgatcattggaaagagcaaaagactcggataggtgagattatacactgaattcgacatggtggctactaacacatggctatagaaaaggatgttcaccgcaccgaccgtaccattcctttatttgcaggcgaagatattcctcatccggatcctgattctccgttcgccgaaacaggtaccaacgtgcacctggagcagatgaaggatatgctcttgacctataacgaatttaacccagaccttgggtacgttcaagggatgagtgatctcctagcgccgatatatgctgtgatgcaagatgacgccgtagctttctgggcgtttgtcgggttcatggatcgaatggtatgtttccacgctgcaaatcgccgcattctcttactaacatctctgcaggagcataacttcctccgagaccaatctggaatgcgtggccagctattagctctcgatcacctcgtccagctcatggacccgcagctctacttacatctgcagtctgccgatagtaccaacttcttctttttcttccgtatgctcctggtgtggtacaaacgggagtttgactggagcgatgtcctgcgtctatgggagacattgtggaccgactatctctccagcagtttccacctgttcattgcgctcgccatactcgagaagcaccgagatgtaatcatggaccatctcaagcactttgatgaggtgctgaagtacagtacgttggcattggcatctgaatgtaaattgatttcaaattactaatttcgtatctccagtcaacgaactctccaacacaatggatctcgtacccattctcacccgcgcagagtcgctcttccaccgtttcgagcgttccgtgcaagccatcgacaagagaggcaacttccccactgcgcccaccgctcaccaacgtcgtccagggacaagcgaccaagattcatcttcgagcaacaagggaaagtcaccccagctcgctgtcgggtcaagcagcggagtcaacaccggcccctctactcttcaaaaggcaatcgattcccagaagccgaaggtggtttctccagagctacgcgaattacttcgcaaggacattccctggaaacgccaacaaacttcatgattggcatcgtgttgaagttgggattggatgtctcgcttgatatgatgttacactcttgaccaagtcatgctttcagttctcgaagtcttggctattgacgatttacgattgcctcatgtatatttttcttcgattttctttactgtcggttttgcggagcaggatatggctcacggacttttatcttgaaatgagcaccccgcatttgaattctccaattacgctgatagagatatctacaataggcagactccacgtagaactacatctagtaaggtaatagactcgtctaataaggaccgcggcataccaaagaatacattgttgtcaatatagaagtgtttaaagctggtcaaacggtgctggattgcgcgagggagatagcttcacgagatattatcgtcagtactgcaaataaagtggcatatagggtagatggtagactcacacgaaaagacaaggctgctcatatagacgtcaacagccgccagcaatgattctggcgcgcatatgcctatattcatcgttcatgtaacgacgtacctcccgatgccgctcgagaacatctatagctcagtgctgatcactcagtttataagccagcgcgatatcgagggagcgattcacgtacgcagtattacgagcgtcgtcagcatctagccccaaccacaggatctgtcggggactgatgactgagaaggaaatgataagatgagagaaaagaaaagaagaaatgcaggaggagaaggactatgaaaggcagaaaatcaacgataaataagaaaaagaaagtttacttggcccgaagtgaccagcgacgaccagggtctaattccttacaacccatctgcggtaagaccaaacctccagtgaagttcgctcctgtcctagggccgtcgcgtcgtagccagccggatgtattgcatccgcctgtgaagatataccagtctttccatactgggagtgttgggagaccgttctgcgagatcgtaattgttggtctgtgtggtactcttgtcttacggatctctcctttaaagtcgaagtcccaagcgaggttttcggtgcggtaactatgtcgtgattcgtgaatgcaaagcgaggcaatggctgcgtcgccggtcaggcgtacgtgacgtggtcgccacacgatctcgatctcgccagtggttgggtcgattacgtcttcttcgtgctctggcagtgtcgtcgccgcttcgctggcttttctgggtttcgcagtcgttccatcgccggcccagtcaagggggatcgggtacattcgtagacgtggtaacacagtagataaagagaaatcgacatgtcacatgattgcgtctcagagcaggatgaagattcatgtggcagaataaattgctggttgatgtaagactgggatttggatcgcagttggcacctcttcagaatagtgattcgagtaagcggcgacttctactgcgagccctttcttgctctcgcacattgtcaattcactccagtctgtctcggtatggattggcgcgatcagcactcgagctatgttcagggaagtatctcggtgattgatagatggactcttgatgaggagcacgggggggggggggggggggtgnnnnnnnnnnnnnnnnnnnnnnnnnnnnnnnnnnnnnnnnnnnnnnnnnnnnnnnnnnnnnnnnnnnnnnnnnnnnnnnnnnnnnnnnnnnnnnnnnnnnnnnnnnnnnnnnnnnnnnnnnnnnnnnnnnnnnnnnnnnnnnnnnnnnnnnnnnnnnnnnnnnnnnnnnnnnnnnnnnnnnnnnnnnnnnnnnnnnnnnnnnnnnnntaggagtgagtgcggggggggggggggggggggggggggggggggggggaggatgtagagtgtaagaatgagggaattcgagaatgatacttattttacaattagcagtatgaagatcatctgactggggattacgtcttttggattctaattcattcttctgtcaatcatcagcagttattagtcaggcctttctttgcactctttgcctcatatcagagatgttggaggctcatgagagtagtttacttaattaattatacattgaattctttattttcccaaaggcactccgtcttagtgaacaagacgtgaatggcaacctagagatatctatcaggcttccaaatgaggaaaccctattagtgttgacagaaattgttggtttagcgcgattatcaaagagctcgatgtctaagttttgctgtccatttcgatatagaataattttcttatatcaaatgtctatcattgacctacttagcctaagccagaatccacgtgacatgctctaacacatgttatacaaagagttggacccatttgctttatattaaggcctttccttctctctcttcttcttcctcttctcccctcactctctcccccctacatcccccaccccctatatttataaataatctctgactgctatatttgacactcaatttgctgcgacatgtagaacagggtttcaccaacctcctgcctatactgagtcccctttataccggccatcgtccttaccgtgcgaactcatattagatgttaccatattggccttatagctaacttaatacagcagacttcggatttcctaacgctccactgcactcgcgagcctcgcaagcatgcagaagtcgtctaagaatttgatatttttatatccattgtttttggattgattttcggtctaagaagaaaccgaagaatgaaaacagccattcaaggtcaactgcattcgaaatgccgccgcctcggctctgccagcgctttttcagggagcgagtcaaataagaactggtgagctttccttaggtcttcgcttttattctaccccttatgcatctacatcgttgcatatcctttcatttgtcttcaactccgctaaccaccgctgcaattacagtcttcagcctctcgagctagagaattgtgactcatagaatgatttccgtcgagcagcgaggtgaagaacccgaaaacgccatccaacaaagtgtcagtgaaccggggtgttacaaaatgaggtcccaaatggatacatcattgctcggttcgagaagtctgccacgcggcttggcaaacgaggattgaagacggtgtcagattgtgagccttcgagtcgatgcgattatgcacagaaagaaagctcggtttaccattgcgaaaagtaaactaccctcgctttccctgcaaccaaaaacaaaggccaccatcagcatggccgcccaaagccaatagccgccgccggcaagcacctgactccagacaaagtgaatgatgaatgccggacaggaacccgttcaggaggtggtactgaccttacccggtgaggaggacgaagccgaaaatgagccatggaggagttgattagcggaaaccgaaaggaatggagttgttctttgagaggggttggagggggtcagatctctcaaatacgcctgagcatatatatcggcattcgctttcacggattgagagagagaggaaattcaacaagactccaggaacaggcaatgactgtcaatggattgaaaacaccactcgcaaagatcacgtcctgacgctggactgcttgctataaagtgcatcgaatttatctttacatacagcgaactgattaggtgttgggtgggcggnnnnnnnnnnnnnnnnnnnnnnnnnnnnnnnnnnnnnnnnnnnnnnnnnnnnnnnnnnnnnnnnnnnnnnnnnnnnnnnnnnnnnnnnnnnnnnnnnnnnnnnnnnnnnnnnnnnnnnnnnnnnnnnnnnnnnnnnnnnnnnnnnnnnnnnnnnnnnnnnnnnnnnnnnnnnnnnnnnnnnnnnnnnnnnnnnnnnnnnnnnnnnnnnnnnnnnnnnnnnnnnnnnnnnnnnnnnnnnnnnnnnnnnnnnnnnnnnnnnnnnnnnnnnnnnnnnnnnnnnnnnnnnnnnnnnnnnnnnnnnnnnnnnnnnnnnnnnnnnnnnnnnnnnnnnnnnnnnnnnnnnnnnnnnnnnnnnnnnnnnnnnnnnnnnnnnnnnnnnnnnnnnnnnnnnnnnnnnnnnnnnnnnnnnnnnnnnnnnnnnnnnnnnnnnnnnnnnnnnnnnnnnnnnnnnnnnnnnnnnnnnnnnnnnnnnnnnnnnnnnnnnnnnnnnnnnnnnnnnnnnnnnnnnnnnnnnnnnnnnnnnnnnnnnnnnnnnnnnnnnnnnnnnnnnnnnnnnnnnnnnnnnnnnnnnnnnnnnnnnnnnnnnnnnnnnnnnnnnnnnnnnnnnnnnnnnnnnnnnnnnnnnnnnnnnnnnnnnnnnnnnnnnnnnnnnnnnnnnnnnnnnnnnnnnnnnnnnnnnnnnnnnnnnnnnnnnnnnnnnnnnnnnnnnnnnnnnnnnnnnnnnnnnnnnnnnnnnnnnnnnnnnnnnnnnnnnnnnnnnnnnnnnnnnnnnnnnnnnnnnnnnnnnnnnnnnnnnnnnnnnnnnnnnnnnnnnnnnnnnnnnnnnnnnnnnnnnnnnnnnnnnnnnnnnnnnnnnnnnnnnnnnnnnnnnnnnnnnnnnnnnnnnnnnnnnnnnnnnnnnnnnnnnnnnnnnnnnnnnnnnnnnnnnnnnnnnnnnnnnnnnnnnnnnnnnnnnnnnnnnnnnnnnnnnnnnnnnnnnnnnnnnnnnnnnnnnnnnnnnnnnnnnnnnnnnnnnnnnnnnnnnnnnnnnnnnnnnnnnnnnnnnnnnnnnnnnnnnnnnnnnnnnnnnnnnnnnnnnnnnnnnnnnnnnnnnnnnnnnngcgggagggcggtgggcagcggaggggggggggggggggggggggggggggggggggagttcatgggaggaatgtttactagatgttaacaccccgagcgcgctaagcgtctcggctctctgtctcctcgacagcttcttctgggcatttggggggatctaggcacgcagaaacagcctgcgccctaggcaagtgtgcaacaagaagcatatggatcgtactgttatcttaatccaacaatcaatacttctggcgcttcgagcgctcattcgcagtccttgtactttttggtgtcttcgtcgtgggcacctttttcgctttggtatctcttgtcgttgtctcagaactatagctcatggaagtcgagatatcgcgcattgatcttggaagatctttaattactgaaatacgtagcgtagcgtcttgaatatgaagaaaatgtgatatgtatccaactattaaatgctaagataactctatcaaccagataactgtagggtattgttgaaccacaccaaatcccaaaccaaacacaaaaccaagtgagaaacagattcgccacgctgatgcaagtagaagagaagatataacccgagataacggacggcgtcaaaatgtactgccaaatgtccatatgtccaagagcgcagggccaggacgtgaagaaaaataactgtagacccatccatgacgggtgaagcgggggaataagaagagagaaaaaatatgggaatcaaaagaagagaatttatatgcgaaggatcattctgtcgaagttcacggcctgcgagaccccagacccttcagcacgacccgcctgcttgtgcccattgagccgatatcgccaatgctgcggactttgggtaaggagtgttcaatcacgctgccatcgccaatttcaaatcggtcatcagcatcgtggtcaggcggcatgctcagtgcaaaatggggtgggttctgggagctggagcggcgggtcttttggagaacatctgcaacccaggcttcaccctctgggctcatggattcgtaccgagcacgcggtctgggtccagctaatcccagcggggtggagcgggattcgttggccgtggagacagtagcggttgcgctaggagaatgggcgtccccgactgaatagccagaagacatcgacagacgtctaccggccgaggaagggagaggggagacagcgggctgaggcgaggtaaaggaggagatgtggcctgtcgacactgccctagtgttcatcacatcggatgcggttgagcctcgtcgtttcttgtgaactgtaagggatgaaggtggccgagcgctgagcacggaggatggtcgagagggggtagcccggccagaagcaagatatgaggtagccggggttagcttagtacccggagaagcgtggggtggtgaggaacgtgtctttataccctgcacctccacacgaggcgtttcagacaccttacgacgaccgtgatgaatgacatattcacgaaggtattcgcccaggtcggcccatccaccgccaacacgaaccatcactcgctgcccctcttcgccaacggtgcgaacgaacagttttgtcggtgcggactggcccccatggtggaggtggtagagtttgacacagctgtcctccgtcttgtaggcatgagagtgccgtcttcgggcagcgggcattaatgtcagagaaggtgcgggcgtcgtgctgcgagttggaccagtgggagattcggatctgtaccgcattcgtcggtccacggatgagaccgatgaggatgcgtctacttcgtggttggaatcgaccaaatggattttacccggcagcgagttgagaatcgagttgatcttttcgtcgagctggtctcgcggttgtttgctgtgcttggttggcgaggaagggcggaatccgaaatcggtgagttcggattcatgctcttctacatatgacagctcttgtctcttcacacccagactttcgagactcggatgggtagtcagtcgttgacgccatcggagagacttgggctgaagaagatgttccatggcccttcgagcggaattcatcccgaacgtctttctgtttcgttccgcaatttttgccatttcattttgagtgttcaagtcacttgcagacttccctcgtgacaatttatgctgagtcgggagacgtggaactggtggaatggacgaagcagaagtatcttggaatgtgattctggttcgtgtctaagatagtcaattagaatgagcatattatcaaatggacaatgggccacatacctttggggattttgcgaagtcggccgatgtaacagagtgtgttctagtcctagacgatttcacactagccacacctggcgccgactcgcttcccatgcccaactccaagcgttcattgatgaaccgctcgaggggtagactgaccgtgcgattttgttggaaggagattcgcgggtcaagcttctggttttccaaacgacgcagacgatcctctctcaaggtatgatccccatgcgaaggaggatgcgtagattcagggcgagacgatggcccaaggggtgtcacattagaggaagtaatgtgctgcccatgtgtctcgggactggatatgagagaagaatggtctgaaagcaaagaacccacagatccagtagatgaccgacgacgacgcgtgattttatgcgccactttactatctttgtcgagatcatgcttcccttggcgggatttggaaagtctaatggggctctgcaatggcttgggaacattccgttgacaagattctgctttcccttcattccgcgggtggtgagactcgatcgagcctgacttgggtgatgccaccgccatgggtatttgggaaaccctgctaggcggtctcgatttcggcactcggattactgacctgtttggtgtgagaaccggggagatagttgctgctaccggagtatcacactggttctgttcacggggccggtttggagatttagggtcctggccagcaggagaaccgatggttttaggcttaggattgagttccgctgctttgtgttgtggagaaagttgtttttcctcctcgtcggaggtctgttcttcttcaccagccacagtatcacgaggcaagtctttgcgaccagcgggggcattcgcctcttccgcggcggcaaccccaacagagaagacgaccttggaaatttggacttccatttcaggtacagtggaatgttgaacgaatgaatcgtcagtatgctcggacaatggacttggtcttgtcgatacctgactgggaggtgacatagctccatcgagctgttggaagccgggcggaggaatgttttccttgttttccaagctgcgatcaattgcacaaggcgtagatgcaggagttaagaagggctgtcgattgatcgcaggagttggtggaaagtcggactgtgttggtgtttctaaatcctcatgcttctcttccattggagacttggatagagatattgagagtttgagctttggcgacacattcccttcgactgcaggaagtggcgtctcgttaagaggcaccgtgttgttttcaacagattgcgagctagttggttttgcgtcactggatgagtgtccaataccacactggatttcaggctcatgcttgacggcctgctcctgggggaaacgacgatcatcggaaggttccgatacaactgtatcggaagtttggtcctgttgtgtttccttcaacgactctgtgcgttgtaggtcggctgcgcgcctctcagccatttcagactcggcttttgaccggagccacgcattgtgaaccttgtaattatcggcctcgacaacccacgcagcaaaatcagactcaatggcttccaaatcatcaatccattgttcgggcaaagaatccggacgaccttccaacgcgtcgagaactcggtccatccgcctccccacagccacaactgcggactcaagtttaacatggtcaacagctagagaagcatcggataattcggtagggtcggggaaaaaagaatgtggggctctgatggcgtggagggaggagtcaagggcggagcgggtcaagctgagctccctcagcagcccaggaatttggcgtaagacaaaaatgcgaatgtcccaagtggctagtaaagcgttcagtcgcgacaggtatggaagagcgcgcaaaatggttgctgtgatgacagctgtaaagtcactcagttgtacatagctgagcggcggaggcacggacacacagcttgtggcggacgagggccgagacctggagggaatgtgggcattcaaaacgtgttcctttaattcttccacgttaagatcttccattccatcgcggatttcgtccgccctcctctcgtatcgctcgacgacgctggctgacaagcttccgtagtagctttcctgggtgttgctagggggagccaaaaagccccaagggatagaattttccccagagcacgactcagacggaggaataaaacccatcccgacctttgcgtcgcgttgatttggccaatcccatgattggacctctttatgccacaagttcaggttttgggcagctaccgccgcgcgtatccctagggcgcgttccgaaggcgacacctgggagatacttcgtgaaagaatatcatgagcaccttgttcattcgaagggactgcgtcgatggatgtgagggcttggagagttgattcgggagaaaggttactgaggagagggtcgagttgctgatagacggagccggggattctctccagtgaggaggttgagcgcgagttgtttcgggagtgggagggagagaggcgaatgaaagggcggttcggatttattcgagtggccgccatgccgaatagatgctcagcctaaatctgagatgtaaagtcacagggagcctcgactggctcgaggatggcatgtaagtgacggacgtcggaacgagggcgggaaagaagactgtcgagcccgcatgctgagacgcgcgtcttaagaaagtgcagaacttggctagcagctcgaaattggaaaggaaataaagaaatgaggaaaaatgataaaaacgattggaagttgagggggaggtcgaggtacaaaggtgagaggatgcgagaagcgagggacagcggagagtggaggggtgctgaagtgggcacaaatgagcgacaagaagagaaagaccggctttctgatcacaatgatatccaaacaataatcggaagattttctgaagttgaatttattattgaagtggagattagatcaggggaagggccctaaggtcctagtggagttgccgacacgaaccatcgccgggtgatccgccctttactatggggatatactacagttcttcagttcattttcttatttacgatataacttggactattgaagcatatcggcggatcggaggcttgtggaatcggtgaggaaagcagcgatataaagaaatattactggaaggggaaaacaaggctatttgaaaatagcttcaactatagacgcaaggagtaagaatattaatatttacccaattatttcctatgacctccatagcaaggccttgatatagcaaaatcaaaacaaattacctattcgatcgatctctatcactatgcggtaatgatggcgttgtcggaactgatggcgcacctcctagcctagggccgaggaatatccccgagaactcttcagagttgcagagttgcagcaaaagtatcttctaacaagccagtctatcatcatgcaagggtttcgctaccgcccagaacttgtgaaagatcttccggaagagttcactaaagagctcaaggaatatgaagattggttcatgctcgatgcgcccaagttgaagatgatcacagatcattttgcccaggagctggagaaaggtctgagcgttgagggtgggtctattgtcagtatcagttggccttgaatatcaagtagatgctaactgaaacgttgacctgaagcctatgaatatcacgtggatcatgagatacccaacgggtcaggagaagggacgcattctcaccgttgatctgggaggaaccaatattcgtatatgcgatgtctgtttttccacggggaagagagacttcgagcaacgtcagcggaaatacaagcttccggatgaagtcaaaaaaaccacgaaagaagccttatggggtttcattgcggagcgaatccaactttttctcgacgaaagtcgctgtgaaattgagagtgctagcagtgctagcagtgctagtagtgctagtagtgctagtagtgctcccagtgctcacagtgctgcccgtgctgccagtgcttcaagcccactaccgatggcgttcacattctcatttccagtggagcaaaagtctatccgcagtggtattttgcagcgctggaccaaagacttcgatattcccggagtggtagggcacgatgtagtaccgcagctggaagaagaacttgcaaagagggtaagctcacgttggataccaagaaagtcggagctgatcaaagtagaatgtcccagtgaaagtggtcgccctcgtcaacgacacagtggggacccttatcgcgtcatcttaccgggatccgcagataaaaatgggcagcacttttagtactggctgcaatgcagcgtacatggaagaatgccgtttgatccccaagcttcatgattcaggactacccgaagatgcaactgtaatcatcaacaccgagtacggctcctttgataacgagcgcaaggtgctacccttaactccatttgaccgacagatcgacgatgagtctgcccatccaggcaggcagatctatgagaagatggtggctgggttgtacatcggagagatgctgcgcctggtaatgctgaaaatgcacgacaaaggtatactcttcaagggccaaaatgtctcacgtcttcagactgcgaactcattggagacatcgtttctgtctactgtcgagaaggacatgtcggaaagtctgaccgatatgaaagaggagttcagaaagtgcctcaatctagaactctcattggatgagctgaaagcgtgccgttggcttgtcggcctggtcgcgatgcgttcagcgcgtctatacgcgtgcgggattgcggccatatgcaagaagaaaggaatccgtcagtgccacgttggcgttgatggtgcggtgttcaataaatatagtatgttggagggacgggcaagccagggtcttcgtgatattttcgactgggagccagacagattggacctgatttctctgaacccggccgaggatgggtctggaataggagcagcgctggttgcgagtttggctgttgacccgggtgaactagaagagtgtggcacagaggaatatttgtaaaagtgaatgccatcaagctgttccaaagtgagagagaagagttgtagtgaaatcataggacgatagcgataagcacgtaagtgaggtgtcgaacctccctccattccccaactcgcaaaatgcgattccgaacacaaataagagacagcaggaccttctccagtaagaccaattgttgaaatagaagatcagagctaactcaatcagagctcaccgcgtcgctgtcctcgctaggcaaggtatgttggatgcgcctggagcacgaagtcatccgcttcaccatcatacctgaccaaggcacacaagtgtgggcgtcaataccggtcgtatgcataatgatatcaatttatcagtcatatgatctatatattgaccatctcccaggaaaccattttcgatgactcgacctacgagctacagtccaattccgacgccatcaacatcgaagtcaacatcagcgtcctaaatcgagccctgcgctccgcctggggctcaacacatacacagctccgcctaactaaaaaggacaaaattcccctcttggcactaacagtcctcgcatcagaatggacagagggaaacatggccttggccaccaataatgacacagatggctttggcgacgacccaaatccagacgcagctccagccgatacgacgggcgatcggggaccacgcgagcgccagacatggattacgcaagaaatcccgatcaagatcctcaacgaggcagcagtcgaaggcctgcacgagccgcactgtccagaccccgaagtgcacattatcctacccaatctagcgcagttgaagagtatctccgatcgcttcacgaaactcgcatctacagatagcaaaggtcgaaagccgggtgtgatggcgcccgatgcaccggggatgcactctgtttctttcggcgggccgggcgctagcacagctgcgacggcactgtccaccaactcatctcccaagcttgaattatctgctaatatgcatggctcgctacggttggctattgctacggacgagctgcgcatcgcgagtgtctggtctgatctcgtgaacccgccgttggaccctgcgcagatgagccaggagcagatcagccagcttcccagtgagcttaatcggaggcgggaggcgagtgagggatctgagtctggttgggctaaggtgcggattgatggaaaggattggagtcgggtgcttagtattgggaggcttagtcccaaggttgtcgcctgtgggttttctgataggttgccactcgctggtgcaagtgctgactcgatttctcgtttgttatgtttaggcttcgtcaatgagatggcactagttttatacgtttatctgccaggtaatggacagggggaagaatcttgtttaacggtgagttgacattactccaaggatgcattacccaacaaccaagcgttctaacagtcgtcagtattatattaattccttcaccacatgatactgtccgtggtgaaacttgggctacaatgtcatcttcgcaaggttcaggcgttcgaaagtcggaatgaattattagaaatcgttattaagacacatgcatgtcagaaaccatgcaataagaaacccccaggtcccaaaagttccagcaagcaacaaaatgtcaggccagaatagaacagcaaggggaggaggatgatatacataatgccaggagtacgagcccttgactccatggatgaggtggcaccagggaacagcaacgagcaagctatgtgcaaaagcaaggcttccgataacgttcagtgagcgagaatgcagagagatgtcgtgtctgccgaggcaaaaaaacaggacacatgcaggttgatggggcaatgacaaatctagtaacaggggaaggttatattattcaagggtaggggatgttgttcatcaaagtaatcatgtgataacaaataaaaggcataacaatgaaacgaacataatgagacaaaagaaaaggacattatagcactcagctagtcgagagactagtaaagtactatatcatcagcctttctctctgaatggctgatgattatttagccatcacgtcaacgtagcgtcccttcttcttgccgcgaactgcgctgcccttgcgcgcctgaggcgcaccgatcaaatcgtcaattgagctagcatgagtcaaggacgaagaaggccgtggcggcgggccactggaactaccgggcggtgttggcatggccgctcccgtagaaacggaccgaggcgcgagaccagggaagcctgggctgggggacaagaaaggcggtgcggcggtagaggaagattgaggccggccaccagagaccgacattgggggcatcgggggcatcgggggcgcaccgttttggggcatactatttgagctcgcagtccgactggggggagcggatcttcgaggagggggcggggtggcatgcacaggcgcgctactaccggggtctttcttgttgacccatttcttcagttccttgtcgtagtaaaaggagctctcttcgccaagtttagctctgataggaccgccaccggagttttcttctttcttagctccgccgaaccaaccaccaaaccagcccttcttgccagattgttggggaccctttttagctgcaacacaagtcagattagcaagtgagataagcaataggcgtttctaatacataccatcttcctcggcggcttttgcgaacgcttcgttggccttgcgatcattctccgctttttggatagccgctgcccgggcagcaagatcgtcgtcgtcgtcatccatgatcgactgcttccttggctgctccgcggcccgtggcaggtcctcctcctgggaaccatagcccatgtctacaccagccgcagctggctcgtaagaatttggctcataagagaccggctcataagatgagctggcagcgggaggtgcgtagggtgactctgagtctggtacactggctggcataccaggagggccttgataatatggggattggctggatgtggcagcctggccaggaggatggtaaaagagaccattcaccatagactgtgcagccggatgagcttcagccggtgacgtagcttcttctaccggagcaagaggaatataagaggattgaggtggtgttggttgatacccacccgcgcttggcgacccataccctggagctccataggacatctgttgatcaatcgagggcgagagttcctgtgagcttcggcgttgtccatagggtgggaagtaggaagcagatctctgagaatctattgacgatcggcccttgaactgctcaggtgaggcaccaggcgcatattggctcgatgggtgatacttggacgcgccgctggtaggaataagcggcgctccagccgcggctccaggataagagccgtatatttcagatacagaaggtgagcggctaattgttggggtgccggccacgtttgcaaaaggaccaaactccgcatgctcgccacccttgccggatccagtcgatgcagcatcgctatcatcgcctaccacgaagctattgaaacgagcccacatagaccccgagaccttttccatgcttggtctcgagatccaagagccactgtcgctggttgtttggcgcagacgagcagacaactcttcaacttccgcaaagaggtgttggtgatagtagggcgagggacgagtggttgctttcaatgccgctgccactgcgtcgcaatagccttgcgcctctaaattgcgaccctggtctacgaggcacctggcattcagtatcttaaatgccaacagatgtggcagatgagctgtgggagagttgccgagaacagacatagcaaactcataggcctcggtcagcaagatagcatcttcatccatcaaggaagaatggcaacgctgatggtcagcaccaaggagagtgatgttggcctgtggatcatccgggccaccgaaaacggcagcgcgcgagaagatgtaacaaacgtgagctgcctccgtccgtccataagaactaagcagatgtccaagagaaaaaagggcttggtggtccccaggacttcggttactcaaaaccagtcccaaggtatccctccatttgtctaaaccctcgagggcatttttggtagacccctggccattggccatgctaataagttgcagacctgcccgggcagacggggcaacgagttcgtcgatgctttcttcgatattgccagcgaaaatctcgtagagggctgcaagtgactcggtgtttgcggatttcgatcggacctcgcggcggacaaactcctgcgcgacctgtttcgatattgacctgtccatggtggatgagatgatcatcgcatgtccccaaagacgtcgatcgacagcgctccacacggccttctctcgatcgccacatattaagtgtagtcgaagctcttccaaccactgtgcatcaacagcatcagcctgcaaaggcgtttccgaaggggcaacccctcccgagggggctaagctgcttgcgtatgatccgtctgcgtcggagttgggtaggttggggaagatgatatgtcggagagaggtttgaatttcaggggaactctccagattaccgtcattctctaccagaagcttcacaactttccagagaagggttttctcctcctggcgtttgtgcgtatcagactgaacctgttcgtagcttggaaggtctgaattttcgaatgctgcaatcttgctagaaagccaagcaaccaaatccttcttctttgactttgccttgagaggcccagggtgctggacaatggtatcagcggagggcagccactcgctcagctgggagattttcggttcaccaagagtgggttgaatcattggcgccacttgtccaatggaatagcgagggacgtgcttgggaaaacaagataccatggatccaccgaacccgaatttgaagatcggagcacctttccatcgttccaagggatcatgctcctgcccatcattgggagcgataaattccagatgatgcgtcggagcacgggtttgatgaacaggcttcacaggagcatacggattcacggtttgaattggcaagcttgaaacttgcaccgaagccggccgttggaggggatcgatgtcttgtccgtaggatcgcgggctcgtcaagtcccgggcaggtgactgagtctgagatctgcgaagtggacccatttggaaatcgctaggtggtggagacaatccattggccgggggagcaggaggagcaggaggagcgtgttctggacccggcgcaagacgctgagcgaattcattgagatattcctgaggggcatagcgactttgaggcggagatggctggagaggtgagcccgcactttctctccgcggtaggttggcaggaccgttgaaatattgcggagcactaggtgggatttgtccgaaaccagctccttgctcgcgcggcgaagaaaggttgatcgcaggctcaagcgatgggggcctgtgtgattgatcaggctggtaagaaaccttttcatggtgtgcaagaggacttgaagtccgtggctggaaaggcaaattttggccaggaacgttaagcggctgtgaggcataacgattgcgaacagaagaggtaggagggggcgcaggcgaatatctcggcaacgaaggtggctttgggggtgcttgaaaaccaggaggttgaggagagtaccttgcaacggtaggaggtccgaccggggcactcgatgacaggctagcatatggatccagctgttcaggtggctgaagtgtggattggattgggagcccgataggttgtggggctggtggtacaacagaagcatattgaacctggggaggaggaagagacgatccggtcatcgtcggcgccgtctgcggattaggggtgtaccgacctgagctggcaggcctagatcttggtggcggcagagggagttcctcatagaaattcttcggcgcaggaggagcggccagggctgaggggggagctgccggaggggggaagccagctacagcaggaatcggtatgccagaggcacatggaagaggaggcggtggcatactaattactggtggaggaacaggtttgtgggtaacgaccggctttcggggtcgggagatatcatctggaaggtcgtaaggagatttataaccctcttttgaccgctcagcaaagctctctcccctgattgccacggggttctgcggctgttgcgagaagtatgatgacatcgctcccgtggttggcggcgcagttcctgggagaggaatattctgcaaaagatcaccagtggacggttggtggggtgtgtatatattaggaacaggtcttggctgagaaaagacttgtggggtctggaacggactgttcaagccaaccaccaaaccgtcgttgacaggctgaacaggggtttgatgagcgtgctcctgttcagagacagactgggcagcttcagtctccagcagtatgtcgtcatcgtccaatgccgcctcccaacgagccgccagatcatcgtccagtgagtcaccgagttcagcttcccaccgtgccgctagctcctcctccgatggatcggccattgtttggggctccaacgacgcagccttcagggcatcatcaaactgcgctgcggccgaagtgtcactaaccggggaatcgagagcaaacccggctgattccaagacctgagatgtgctctttcgtgcgatatgaacaacgggttgctcctcgggctctttctttggggtggaggcgaagaaatcctcatcggcgttcttagcctctgtctttggagccgagatgaagaagtcatctacatcgtcttcatcgttggcaaacacactgtctattgatgtctcctgttccgttgggtgttgaggcgaagccggtgtagactcatctaacaacggaaccccttcctcaaacctggattcagcttctggcggggcaaagataggctttgtctggctgttcagttggtcaaaaaagccgtcctcatcggactccacttcaccgcttgactcgtttgcccagaaaggttgatcctgtgtggttgtatccacgcccgctgcggccggatctagatgggcgtcgttggtcggcgcaaaggcctccgcgataggagatggtgatccggtattcccagattcaacatttatcgagtgagacacgagatcaatttgctcattttcggtcggggcgatggcattttcagttgagttgaagacatcaagactctccgcatcacgtgtggcacctgtgaatgctgtttcctctggcaatggacgtacagcttcttcaacaaaatttggctcgtcgctatcctggatttgagtagaggttgaggcgagctctgagatattatgaggggtggcctcttcggtggagggcagcgtattgctcaggtccttctcgaaggtggcccagggattttcagaatcggcattgtctgcgtccgttcccgggaacagttcgtcggtgggagtggactgagaggtatatttatttttagaagtgtccaatgtaggctcggatgccgttgtttcctctcttggaggtgtagtctctcccacaaacgtcgactccggcgctgtttcttgttcaggtgcgacagtgggcacaacagtatctgagttttcggtatgaacagaaggaaacccgtttatgatggtgggaaagctattactggtctccgcgccatggactgaaggtgcttcaatctgaactggttgcgcgggttgagtttttggcagtgtctggcttaggacggtatctgcattttcaatagatggcgtagttgtatgagtcgctgcgatcgtctcatcggggacatgactgctcttatcgacggaatcggtgtctaggcacatatcctggtccaccactggtgattcattgttcactagcacgtctaagctcgtgtattgaggctgaatcccatctacctcatcggatatatcccacgcagagaaatcctcactctgtggcgatacaacatcgtctagtgacctgtcctttggcccgtccgccgcaatcgggtccgacaacccactctggatcgtaacaggggaattattgttatcgggccgtgatgccggattccatgactccgaatcattctcggtcgcttggtgcgccatatgtgcaaagttattatcgattgccaacgtgactgtagatggggggcgcagtccgcagggaccaacctgacacgtctccaatgacgcctcaggagatcaacaatcgtaaggaaaacgggggtcgagggcgtcaacttaagaatccattaaacaatgtagatataacccagagcaaaaaactcaaagaaagaaatcgaccatgaacacatcagctgatggcgaagggaaaaaccaagcagtcggattgtctgcgacagcgaacgtcgatctccgcctatgattcccccgggggccaaatgaatgcgctgagtcatcaggatgctgtcccgaataggaaaaatacaaacccgtgactcggagtaagggatagtccggctctcttatgctcacataaccttaaaagtgaagtattacgtcagctcgttatcgccgcgaattatgcacccatgtgattgcgtggccccgacaaggcagtcctcgaccggtcttcaaaaggattcggtggttcttcggtttatatatctcacaattttttatggtagtggcattggctgcattctacacaaagaaacggttcattgtgaccctagcagcatccctccactctttcatcatcatgctgcatatgcgttttgaccaataccaccgcacatgataacatatacttgagatgaaccttcctttgatgcaaggcccaaaattaccaccttggatgcaaccagcaatccatttgacttgaatcataccagcttcccgagaatgccttcctcatccgactaccaacaccccctagaccatcccgatgcgccggacgccttctcggactcggacgatgacttggatctagaagagctagaccccagcacgacatccccccaacagtcccgggattctcgggactatactggccgcaaaagaagctacgggccgggtattgcgctgcgcaacttacgtgtcggagcggcaagtcggtggagacgcagtgcgtccggacgtggagacatggaggatgataccgatgcgcttttagagaacggggagacacaaggcttgggggactcacatgcaagctctcggaacttggaggatgatgacgcgcctctactagatcgcagaagctcgactcgcgatttggacgatgagcctgccaagcaaggcagccgcttgcgcttcccaatattcaaaattcctgcattcctacagggcacatcaattcgatttggattaaatgatattccctctgagaaccaacctccccgtgaagtacttgtcggacaataccaggcggctaagtatccggctaatgtggtctcgaatgcaaaatacacaccctggagcttcctaccgagaaccctttacaacgaattctccttttttttcaacatctacttcctccttgtcgctttatcgcaggtcatcccggtactgcgaattggttatatgtcgtcttacattgcccctttggcctttgtggtttcaatatcattgggtaaagaggcacttgatgacattggtcgtcggcgacgagatgccgaagccaatgcggaagaatattgcactgtggcattaggaaggtccaacgagatggaggtcacaaaaaagtcgcgagatctgaaagttggtgatgtgctcaaagtccgcaagaaccaacgccttcctgccgatgtggtaattctgaagagcatttcaaatgattcaggcactcctcgtcattcattaacagaagaacctatccctgggacgtcttccgacttgctcgaaccaggtcagggatcgtccgaacccacaatcaacaccacattgaagaatggtgaagatgttggagattcaccctcagctgatactttcatccgaactgatcaattggatggtgaaactgactggaagcttcgtctgccttccatgctgtctcaatcgcttcctctgggtgatttagctcgactacaaatcacggctagcgctcctgataaaagagtcaacgaattcttggggactattagcttgggaccgcccactgggctctacgatgctcacgttgacaaatcatctgggcctccaaccaatgaaggaacgcctgcgcctgtggaaaatcaatcagctcccttgacaatcgacaataccgcctgggccaacactgttcttgcgtccaataccaccacttacgccgtcatcatctatacgggatctcaaacccgagcttcgctttcgacttccgcttcccgttcgaagacaggcctgttagagctcgaaattaacaacctcaccaaaattctttgcgccctcacattcactctctcaatcatccttgtcgggttggaaagattccaaccaacaaacgacaagaaatggtacgttgctatcatgatctatcttattctcttctccacaatcattcccatgagccttcgggtcaatctggacatggccaagtcggtatacgggcggttcatcgaacgggacaaggacattccaggaactgtagtccgcaccagtacaattccagaagacctgggaaggatcgaataccttctttcggataagacgggaacgttgacccaaaatgagatggagctcaaaaaaatacacgttggcactgtctcatacgccaacgaggcaatggacgaagtcgcctcgtttattcgtcaggcttttgcgttttcgggcaatgccttgattaccccttcaactgtctttggtactcaggccggacatgccacagcgccgcggacaagaagagagattggttcccgcgtccgggatatcatattagcacttgctctctgtcacaacgttacgccgaccacagaggaggaagacggccggaaggtgacgagctatcaagcgtcatcgcctgatgaaatcgccattattcgatataccgaagaagttggattaaagctagcatatcgagacagacaaagtatcgtcttggaatccaccgactccaagcaggttgtggtccgcgctcggattctcgacatcttcccattcacatccgactccaagcgaatggggattatcgtccaattccagcacgatgaagacatacttgaatccagcaaagatgatagtgaaatttggttctatcagaaaggtgcagacactgtcatgacaactattgttgcagcaaatgactggcttgacgaggagactacgaacatggctcgggaagggttgcgaactctcgttgttgggcgcaaaagaatctccgcacagcaataccaagatttctctgctaaatacaaacaagcgtcactgtctttccaagggcgagatgcaggcatggcgaaggttgtgagcgaataccttgaacaagatttggagctttccggtgtgaccggtgtggaagatcggctgcaacgcgacgtcaaatcctctctcgagctgttacgcaacgccggtgttaagatctggatgctgacgggtgacaaggtggaaacagctcgttgtgtcgctatttctgccaaattggtctctcggggccagtacattcacacagtcaccaaagtcacagacaagtcgactgcccaagaggctcttgacttcttgcgcaacaagactgactgctgcctgctcattgatggcgagtccttgaacctcatgcttggtcaatttaaaacagctttcatctctgtcgcggtgctacttcccgctgtgatcgcgtgccgatgctcccctacccagaaagctgagattgcagacctgattcgccaacacacaaagaaacgtgtctgttgtatcggagatggcggtaacgatgtctcgatgattcaagcagccgatgtcggaattggtatcgtgggcaaggaaggccgccaagcatctctggctgctgattttagtatcacgcagttccaccatattaccaagcttctcgtctggcacggccgcaactcgtacaagcggtctgctaaactagcgcagttcatcatgcaccgtgggttgatcatcagtgtttgccagactatgtacagcattgccagccacttcgatcccaagggcttgttcatcaattggctgatggtcggctacgccactgtttataccaacgcaccggtcttctccctcgcctttgatcgggatgtcgacgagcgtcttgccaatctctacccagagctttataaagagctcaagacagggaagagtctaagctaccgctcgttctttggctgggttctcatttccgtctaccagggtgcagtgatccagggtctctctcagatattgttggataccatcacagggccgcgccttattagtctttccttcacggccctcgtcctcaatgagcttggcatggtcgccacttcaatcacaacatggcacccggtcatgatcttttgtctgattggtacgctgcttgtatatgcaggcagtatccccttcctgggcgagtacttcgaccttagttacgtgattacccttgactggttgtggcgagttttcgccgtgctggctgtgtctctggttccggtctgggctggcaaaatgatcaaacagtcgtggcacccgccaagctaccgaaaagttcgtggatagagttgctttgtcatgattttggtgtatcatagcattctctcgcttggattttgttatatctctcttctttcataccctagctaccaccggtctagtatcatgtggctctctgtatattaatcttgagcgttttcttgttgagcgcatcggcattgggctaggtacttccatactagattattcaatcatttcagtttcattattggaattctgaccacctagacagagtacaagttcacatagtgtctatattatctccatcaactcttccggaggatatatattattctcattcatgctatgtatcttcgtcatgaacttgaataattgtagcagtcactccagcaattaaaaaagggcatttgaaaccatatatacaacaagatcgcagatggatgttgtacttacatatagtactccgtagttggattgcccttagcaggcggatccccagggccctccaatgacgttacgcagaatcgataagcaaacacgtgaccaccccagtcaggaaggcggtcaatccatatcgaatcttttttttttcttcggggtcaaacatctgctgcatagattctaggatcaaccacttttcggttgctaattcctcgcccgtcatgtctgacgaaattgtctggcaggttatcaaccagcaattctgctcctacaaactcaagtgagtattaatcggagctgctggctatttagtccgcagagccttttatctccgttatatatggatcgaaaaaacaagaacctcccattaaccattccaaccttctctccagaactacgaaagaccaaaacttctgtcgcaatgaatacaacgtcagcggtctgtgcaatcgccagtcctgcccactggccaattcgcggtatgcgacggtgcgaagcgatcccgaaacgggcgtcatgtacctgtacatgaagactgtcgaacgagcccacatgcccagcaaatggtgggagcgtgtgcgcttatcttccaactacgccaaggccctcgagcaagtcgacgagcgcctcatctactggcccaagttcttgacccacaagtgcaagcagcgtctcacccgcctgacgcaggtcagcatccgcatgaagaacatcgccaaggaggatgagcgtctcggagaaaaggttgtgcccaagctggcgccaaaggtccgccgtcgtgaggcgactcgcgagcgtaaggccgagtctgccgctaaggtcgagagagccattgagcgtgagcttattgagcgtctgcgcagcggcgcttacggtgatcggccactcaatgttgaggagggcatctggaagaaggttctccgtggtcttgagcgggctggtgacggtgagcgtgatatggatatggatgacggcgaggagattgaggaggaggaggaagagggtgttggtgaggtcgagtacgtcagcgatctcgatgaggatgaggacctcgaggatatggaggactggctgggagttgactcagccgattccagcgattacgatgacgatgagagtgacgatgatgacagcgaggacgacgaggaggctagcgcagatgagaagaagcccaagcccagtgccaagcggaagcatgttgctccccaggcgaagcctcgcaagaagggtcctcgcatcgagatcgaatacgagaccgagggtgctggcaaggaccagatcatggcatgatttcatcgatgttggaggatttgggaaaagtttacctgatcttgcatggtgtttgggctgtcaattcttttgttttatattcttattctgtgcttagtgatcgggcatcatacccttgctatactgcatccactgcaactcacgatcctagatcttcgaatgtctattttattttcaattctaccgctatcttcaacataatttattgagccaagacctggctgttgctttatttaggtgaaacacgtgatcatgtgggccaatgaatgccctccactatcgtcgcctttcattctcctttaaacaacttcacctcaccaggagccggttcttctgttaatatctcccttagtaatcattccaatcatcataccttgttcaactctttggctctgaatatcttgcattcggtccccacaagtaaagctccagctccgcgccaaccccaccccgtatcgaagctgccattctgcagacggcgcattactcaaccaaaccactcggctgctgcaatatgagctcgtacctctcatccttgaccacgtcttcggccatctctggcctgggttcgcggctcaccaaccttcgccgtgccattactctaggcgacgagggagacgaccccgacaacgaagactgctcccacatctccaacgcccttcgagcctactacactgaaaagggccgtccattcccaccatggctcccacaagatcccaagggcccagctccggcaccctcgcgcgcgattgcgacttcacagctaccctccggcggctacaaccaagggtcccccgccaaccccaactccggccggagcggtggtctaggtgacctatggggtgattctcccacatcacaagcatcaatcccacagacagctagtcttcgtcgcggacgtggtgcaccgccgctctcctcggccaacagcgcgccgccgggtccggccatcacactttcccagtacgattcgcctggatcgggtccatctggagcgcggccattgcctagccaacgagccgggtcgcatcagcctgttcagaatcgtccgaatctcgaccgtgctgggtcgggtggtggttcagcccaggagcgactgcgggccagattacagggaggaaggtctcctagtcccaatattgacccgagtattcggaagccagttggagcgtctgggaaacggtgagagtgctgaggcttacattgcatagtggagagcatggcgtcgaggagttattttccaatgtttaccgaatgtttaccgagtacatatctcaagaacaaatctcattcaacgatagtcatatggttccaacggagtagatctttaccggatacattcgtatgttttgagaattcgcgctagtttgactttcccccacgcttcgggggcatattaggctgagttcttcagacgggcagagatcaccccaccgtcatccaacgagctaagatatgcaatcaacccagaattgcttagcagcagccaccaatatcaagccacagccaatgaatggctatctcggcctgcgatggggaaaatcccgcattttaccccgacgtcgtcatcccgtgtttggagggccgtgttgctccagcaagggaacataacgcaattcggaaggtagtttcctttctctcttcaaaaagttgatgggcccaagcctagatatcaactcgactaaagaaatcatgagataccccagtttccccgaaatgtcgccgacggcagtcctctccacggggaccccaggccagttgaataccgagtcatgcaacatagagtcttttcagtccctggattatctccgaggtgtggcttttgtcatatgaaattccttttcgtttgtcgctaggtaataccttcggcttctagtgtcggaattgtcttcttccgcaggactccctccgtccaattatacgtctataccgtgatatatgccaacaaaacgggaagccgggaagaatccagaagtgccagaccacgtttgaaagtgtgtctgaggactaattccgagtattggctgttgtgtggcctggaatggtcgacataagctttgatggcaaacgattcgtccacaatcccgatggcttgattccctgtcactccaatccctgctgtacacctatagtacactgcgtattccaggtttagtcctgtttttaccttccggtgagaccgcattttcgttcttccccttctcctcaacctccccggactggtcctggatctccacttctctcacatgggtaagtaccgagtgtatactccaggccgagcctataggacttggccaatttctacaacataacgcgtccctgagcggttttttgactttgcttttttgccgaacccccacacggagcctttgtcgtgcgtcataccaaccgtcgctatagcccatctgcacggcctcaaatagtcctttctcctcttccaatggctagtgtcattgcttgttccatacttctctccattccctattagtcctggtccctgctccggtagagcctggagtgacagttccactccactattatacatatcctttagtagacccccaactcatatcctgaggtctcgttcatcatggccgacctcaaagatgtcgaggcacctcagaacacgcacagcgaagacaaggacgccgtcgcctttgagatggacgatgtggcggaccaaaagctccaaaacgggctgagcgaagccgccatggatgcggaactgcagcagctggaagagcaggtgcacattatccccaaatcccgcctcgatataaccatgtccaatcctgctgcctttacctacgtcctcgtcgccttcgcgtccatgggaggtatgctatctggtcttgaccagtcgcttatcagtggcgcaaacctctacctccccgttgatctaggtctgtctgcagcagataacagtctagtcaacgcgggcatgccactcggagccgttaccggtgctcttctcctttctccagcaaacgagtacctcggtcgtcgtatggctatcattgtctcctgtattctgtacacaatcggtgccgccctggaggctggcgctataaacttcggaatggtgttcgcaggccgattcattcttggcgctggtgtcggtttggagggtggtactgtcccagtctatgtcgcagagtgtggtatgttttccatcactccccatcctatctgtatacccagttctaaccccactctttaatagttccccgcagactccgcggtaacctcgtatccttgtaccaactaaacatcgccctgggtgaagtcctcggctacgccgtcgctgcaatgttcgttagcgtcgaaggaaactggcgttacatcctaggctcctcgctggtcttctcaacaatccttttcgtgggtatgctcttcctgccagagagtccccgattcctaatgcacaagggacgcgaggtcgaagcgtacgcagtatggaagaagatccgtggattcaacgacctcgaagccaaagacgagttcctcggaatgcgacaagccgtcacagccgaaagcgaggaacaagcccagtcgaagaactacccctggatggacttctttactgtacctcgcgcacgccgcgccatggtctacgccaatatcatgatcttcctaggacagttcacaggcgtcaacgcagtgatgtactacatgtcgacgctgatgcaggccatcggcttcggcgacaaggacgccgtcttcatgtctcttgtcggcggtggggcattgctgatcggcaccatcccggccgtgctatacatggagcgatttggtcgtcggtactgggcgaatgtgatgctgccgggtttcttcattggtcttctgctcgtcggtgttggctacactatcgatgctgataagtaccccgccgcggcacagggcatttacttcacaggtattgtgctgtacatgggtttcttcggctcgtacgcttgtttgacgtgggtcgtgccttccgaggtcttccctacatatctgcgctcgtatggaatgacgacggccgacgctaatttgttcctgtgctcgtttatcgttacgtacaacttcacgcgcatgatggagtctatgcagcggattggtctgacgcttggtttctacggtggtattgccatcctcggctgggcttatcagattatcttcatgccggagactaagaacaaaacccttgaggagatcgaggagattttctcgctccctactgctgttattgttaagcggaacttgaagcagacggcgcaggttattcgggacttgtcgcgcttccgtcttaagaaagtgttttctcctgagccgtacaactaggctagtaatgcatatttgttggcaagattgaataatgagaaatggaattggtttttgttcatacaaagtttgccattgattgcatagttaatggttccattttctatcatggctgagtagatataggcaaagctgactatttgtatctctctcgacgtgctaccaggatactcgaggaaaggtgtcatggaatgccctcttgggtccaaggatgaggaagtttgtcgacactccgctgggtagaatcgtgagatatatacataaatgtccggaacgcggagcgactaaaattttccgcagcgccgatacatttacacagatacgattcctaggcaaaataccaaaattctcccaattgaatgccgattttgcgattggcaacaacgaatgaatgaatgacccatggcagctacgggtgggaagaaatgcaagagaaattaaaaaaatttaaatgagctctgagggtttgtggagctggtgggtatgtcattgtggtgtttgggagcacggacttcaggctttggtgtaacgagtattggttgaggagagaaagagaacatcggaaaggagttttgcatgtcaaagaccaaattgaaagtgagacatgatgatatggtggccgaggcatgttcttgtccacgatggcagttactatatacaatgtaattagattgcattgaaatgaaataaaatgaaccaatgattttacggtaccccatctggacacgcccgagaagtataaatcttattgcgatgttgtatattcaatcaagtcaaagggatccttcggtatagcgccttgcaactcccgatgcggtaagagtccggcccaactccatgccattttattaagatacccttttgaaagagcgcatcttttgggcaaaaacaactgcgtgaccataaatatttgctaacaattaaaacggggaaattatcaatttaatttgataaaaaaaaaacaatgggacgagccgggatcgaaccagcgaccttgcgaacttcagtcgcacgctctcccaactgagctatcgtcccatttaggatgatgatcgaggaatagttatgcatcatgaacagagtatagctccccaggtagcccgtttttgtctccgccttcttcactcatttctctagatcctaaccatagtcctacgtttgtatgactcctatcataatgaataattttccacatgtttctaggacttgtatatgtaagcaattatcagttcataactatagatcagcttaaaataacaagtacataattatgtactgtcgtctcacaacctgaaatatggtatccgtattctaccagtgcagtcagtgccaacttatattatctaattaagcctaaatttttatcccaagtggttatttctgcatgagctcgtgtaggaatattgctggtgttgaaagcaccaactgcatatatataacagtttctttcctacgtctttctatggttctcaggccttaatacatacattgcatcgcttagtagattgagttactacgttaatatcttccggtagtattcaaagatattaggatgcacctataataggcactcgtgtactgcgagatggttatccattgcattcgtagatgccgtttagaaccctaggaaagcgaccatcctgtattatttaatcatggtatcaacctggtgatcttcttctatcccgaatgggacgatagctcagttgggagagcgtgcgactgaagttcgcaaggtcgctggttcgatcccggctcgtcccattagtttttgcttgtttttgtcttctattgccttctctatgtcgatggatggcttacgtctcgaataacaaggtcgagcggagacgggtagacatgcttactttaagattttaccgcggctacctcctgcttaagtgctattttcgaatctagtgaacatctctattattcgcaaccactccagcctcgggatgatccctctagaacacatctaccccaagatggaaagtgagtataagtacaaatataacaagtataaacataagcgtacagtaggccaacaaaccgccaacaaaacatgagtatgtcgggtgtaacatcaatccctcaaggcttcaaagtccgcttggattgacgaacatataccgtcaactagtgacatttcctcctctactggcacacctaaggctccagcttgccaactcaccgtgcacaccaagcttgcccctttgacactgatgatgttgaaaacaagcggggcactagtaacatttccaggctgcgagaacaccatcttgacgaccttgcacttttggactgacccgtcactcgagttttcgaaggcaagtaaattgctcagctcgtacgaggagtcccgctgctgtccaagtttactcaatgtccaatttctgatgctgggaacgtatctcaataggccgattgcttgatcttgcagtctcgcaccgcacgcagcgaggtttttcgtcatcgagctcgcggctgcccacatctcctcggaaaaatgaggctccgttacattcggtgcccgtggatgtgcctcgtaataggcagaaacgaaaagaccccatgtgagaccaggcgtcccaatagacgctcgcatgtcaaccggcgtccccgagacaaaattggttacgccagggctaggaatggccctgcttagcgcccggacgatcatctggtgcatcgttgccgtgagcttggtgtcatgacttcttgaagtctgcagggccctttggaccagcggagccttaatctcgaggagtcttactctgctctggagagcggctgccggatcgaagaacatgggtgacccaatccaagtaccggcatctagagtgctggcagatgcgcggagcccaagaaaattggctataaacttcggcaagcaaactgcaatcaatggctcgaggagaaatttccaagatataggaagcctttcgggtgtgtcaaacggtgccggaagcgtttgacttggcagagtcactaagaaagagggtttctcctccatgccagtagtctggcgccatgcatcgagaaaggcacgatggaatgcaaccccgaccatgccgtccccgagagcatgggagaacgcaaaggcgataaagcatcgcgtcgctgtggggtcttgcggcgataccaaagggaggaccacgattcgccaaggtgggataccagcaggccatgggcggtcaaggatggctggtaagatcttttgaattgttgccgtatcgccattggtcctggcttcgtcttcgtgaattatagacaagtgatcgtgcagatcaatactagaaaccgcttcgtatgttggcttgtccgtctgcttcgccttgatgaccacgcttaggtatgggaatttctcgatgcagtgtctcaaaggtgcaataaatgactgagcggagtggacatctatattttcactcgcaatttcatagattgctcctatgacgagcgcgttgtagaagccgacatcttcgcgactaattgtacgacattcattgggacctgtgttccggttagcgctacggatatagctcaagaagtatatttcactaacttgcaagtctcatgaacgttgtggggagcgacattttcgtacaacgtggtaaacgtatctcccccgtaggctcaggctccagtgatgtgaatttataggatacgatttagcgtgcctatttgagtttagcgtggtcctgccattagcgttaccaggataggaacaagtagaagttcgtagagcgactacaaaactaatcggtatatcaaagcaaaagagtgcttccaaggttcaaatctattattcatgcagagtaacggatgaggcccggaagatgcataaataagttgctaaattaggcaatgagtgtcacccgcaattgtcacaatccttaagtaatggtgtttttatatatgaatcgaggtctttcgcaaactggagtggctaggacagcttggggtttcttgtaataactgtataaaatttcgttcgagctatagaatcatctaggcaacactatcattgtagacctaggacaaatgatctctgctagcaatcttgatccagaaatcatgatgcaccaacaaggctaaattctcctgtttccaaactggccttgttccgttgttgatcttgggtcggaacagacggaagaactaccagctagtcagcgagaatgaatagtgaccttcaagaaaaagaaacatacctgagccaagagcttatacgtctccaaaagtgcaatatttttgcctaaacagatgcgagtgccatatccccacgtgagaatacacttgtccatcaaggcagcccgatctggatcctccaaccagcgctcggggcggaattcatgagcatcctcgccaaagatccgccgattccgatggacaacgtatggattggcaccaatctccgttccagctgggataaattggttatgaagtgtcatgcctccttcagagacgtagcggggaatgatcatcggggtggagggctgatagcgcattgtctctttgtaacaggccgagaagtagggcatatctttgatctcatcgtagagcggaaccggatggctgagaagtcctcgccgatcataatcgtcaatctcggcgaccaacttctcatggacgcctggagtttggagcacgtatcgtagaaatccgcagaagaatgcggctgttgtatcagatgccgccaccattaacacaaaacattcggttttgacttcgtccagcgtaattgtagacccatcggggttctttgcgtttaggatattgtctaggaagtcaccctgctgtcgttgtttgggatttttcaatcgctcttcaaggagccgatcgcgaaactagtcaattattagcgttatactacctttgactgaatgccaaggtactgagaggtgtataaataccgccatgatctttcctgttcctgacccatctccgggcttgggcatgaaataccgtctcgtgatggggttctccaaaaatggccgagctagccatggcaaagccccaacaattgcagcaaaaggggccattttatggaagttttcaatcaagttctccacatcacggccttgagtgatgaatccaatcggttcaccaaaggaaagctggcagatcatgtcgtaggcaaaccatctgtccgaatcagcttcttgctcactattcatatctcatatggcggagtttactaactgcgaccaagcagcaaaatccatttcttgaccagtgtgggcaaacctctcagtcaacacgttcgtccattggaaaatgcgctcatcaacctgaccctcgagtgatttcaagttcgtcaacgtaaacgaagcagccactctcttgcgcttcatagcatgctcatcatgcttaagcgtctggaaaggcggcgcgatttctcctaaaaccccaactgtatacacatcagttttatctactcggcgatgataaatctggggcaaaaacataggatcatccacggccaatagattcggtgcggcccgcacgatagatccgtatttttcatgatactcaatgcctatcgtgtgcgcttgtttggtgtgtaggatccatagtttgaagaagtcggagatggaggcccagaaggggccagggaatccgcgtaggggatggaagtagcggttgtagatgccccggtagaggatgtaggttgcgagcgcaacgacgccgagaaggcataaatgcattttggttgattaaataaatgcgcaattcgtatagtttcgagaaatgctgggtgttttatcagtcattttctgacctaacttgcatatactacgtatgacaggctgatggtcagaaatcagaccgccgttcattggctgagtgagatcatttgaaacgtcaaggagactagaagatgatggttgaattaatctcgaggcgctgcttcaatgttcttagatctctgcgcctaatttcgattatgaatgccaacttttgtaatcgtcgaggctctcccccttaaattgagatacttgatggaaatgggatatcacaaagtaatgatcaattctaatgaaaatggatgaagaagaggaactgtccgaggagaaaccaagtaagtacctacacctggtgggggaaagccttgtacatgacaatcaatgtgttctgggtttaatataggaaatgacgtaaacagaagtgagaactgcattctttgctaagtcctgtgaatagtggatggcagaggtgacctcagtttgtattaattctagtcagagggtttttgtttgagaattgtgatactaaaaatactacatggcagatttaaaggctaaaaaagaccaatatgacaatgacaaggtttatgattgaggctttaggtaactctaatagcagaaaagacgaagacaaacaaattatagagtcagtttgctctccacagcatcggataggatctgcagcgacgaggtctgattcaaaacatccaagaaaggaatatcaaccttgaaaacggtgtagaaccacgaccggaactccgaggcaatcatactgtccattccgtaggaggtgattggcttgctcgagtcgatcttatccaatcccatgagcagcaggttcgagaagcgcttcctgacaagaagaagaattgcttcgttgagggtggacgcggatgcaatttcgctgttggttgagaccatggtcttgaggacaacggnnnnnnnnnnnnnnnnnnnnnnnnnnnnnnnnnnnnnnnnnnnnnnnnnnnnnnnnnnnnnnnnnnnnnnnnnnnnnnnnnnnnnnnnnnnnnnnnnnnnnnnnnnnnnnnnnnnnnnnnnnnnnnnnnnnnnnnnnnnnnnnnnnnnggccgagggtgtggggggggggggcggggatccccgcggcccaggggagggcagatacagaggtagcggaggatgacacagcagaatcctgagaagcaggtgaatcgagcgatgcagatagaagaacggctctgggatcttgcattgtgccgttgctgacgtcaaatccttgatcgagcagtttgcggatggcctgcggctccagtcccgtgaggatgtgcgaggcagaaagacggtcatactcgagacctggggccagtgactttggtccatcagccgaagtgtgggcgagtgcgaggtcgacgacctggatcagctcagcttcgttgagaggctggatacccttccggaggaggagcgcctcgatttccgggttttcatgaagataacccacctccgagatcattccgagaccgatggagacgatgggctttccgacgctgcgacggtatcttgcgaaagcgtcaaggaagccgttggcagagcagtagttggattcggtggctgtaccaacactgcccgagaccgaagaggtcaggaggaagaagtccagttcgctgtcaccgtgagcttctaaagcatggtgcaggttccaggttccttgccatttgggctggatacccgtatgccaagccttatgggtcatggtggaaaagagggcctcactgagacccattgcggcttgaatcacaccgccaatgggcttgatgcaagcggcgacggcggcatcggcatcggaggcattgacgatgtctccgcgaacaactttgacaacagcaccagaggcctcaaggttagacaccagctcacgggctgcaggcttgtcacagccagagcgaccgaggaaagtgaaatgacgagcgccgcgatcgaacatccagcggctgagactgcgacctagaccaccgagacaaccaatgaggaggtaagacttgtttgggtcaaaggtggtgagatggcgcgcatgggcaacttggatgagactggatgggttctccaacgagatcacgaccttaccaatacggcccttggtagagaagaagcggtatgcttgagcgatatcactaacatcgaaggtggaaatgggaactggcttgacagtgccagctcggtacagctccaaagcctcggcaaatttactagaagaatattagttggtgttgtaaaaaaagaatggagaggaaatattacgtgatccaaatgttgcggtagtgttcatcttcgtggtagaagagctccgtcagatcaaaggcagtgaaggtcacgttacgcaagaacatgcgcatatccaactgtccggcatcgataatgtcgcgcttgccaacctccacaaagcggccaaagttggcacaacattgccaagtggcatgcagcagatcgcctgtcagggaattgacgacgacatcaacaccccgaccgttggtggcggctagaataccggcaacaaacgaatcattccgggagttgaagatattctcacgaggaaccccaagttcgttgacaagataatctttcttttcatctgtgctgacggtggtatacacggtcgctccgcgttgaagagcgatcgcaatagtggcggttccaaaggcaccggcaccggaatgcacgagaatagtttcgccggagcgcaggtgagcacgatcatccagggcatatagagcagttccatagataacaggcagggtgggcatcacttcaaagctctcgtggggcagcatcttgagacaagcccaggccgggacccgctcgatggtgctgaagctatttggtgccaggacaacaacgcgatcaccagcaacgagattggagacatctgaagcaacgccacggacgattccactgaactcaatggcagccgtgcccttgcgggtttcgatcttgccagacagcgtgtagatgtctttggcgttgagactaacagccttgacttctatttcaacctgaccagatggaatctcggtggggggattggccagacgttggaaataaattgagtcagtaatgccaacacgcttgatggcaagctgagcaggggacgcttcggccagagtcatggtgtcgacctcgtcagttctgcgcttgctgaacagatcattgagtgtggtatcgggcaggaatcggctcacgtggaggagaccattgtgccagacaaactccttgtcatcggccgtgtcctcgaccgtgagtatgtgctcgactttcgtgcaaatggcatcgcgaccggtgccgctggggtgctttccaacgtccagaaccacaaagcgcagagctggttgttcgagcatcagggcacgcgagagaccgctagacagagagagatcaggagcatcaccagtcacagtggaggcgcccgtcagccaaatgagctctgcagcgttgtccgtgacgatcttgaaacgcatcatctcctctggtgtcatggttgggatgaagggggtctccatctccagtagggagatgacagtcgactgcgagatcatctcctcagtcacttcatcaaggcgtgcagaggagatgtcctccgcgacaaagaactggtggagagcattcgccatcttcgacggttgatcatgaagcaggaccacgcggcggttccatttgcgctgtggctgagaagaaagaacaagagtgattccaaagggtagattgaatacagtgcatccagactgaaccagaatgtcagacgggacactctctgttcgggcaacaatgatgccattcacatcgagcagactcagaaactggtccaccttcttcaacgacttggggtatgtgctatgaggaagcaaaataacgtcgtacttctcctcggtctcctcgatcttctcgctctcggcggtcttccattctcggatgcgagggaaatcggtcttctcatccaaaaactcccgccatccctgggtcttgcagtcgcatcccttgccgagctccaacacgcgcagtcgaggattcttgtgcgcagccagatccaacaaggcggaaacaacaccaaccttgccattgtccgccaaatcggggtggttgacaagaaaatcggtgatgacctcttgcagatgaggttgatcagcggttgtcagtcggctaaggtctggcttccagaccactcgcaagcatgggtgacggcctgtgtcggagtcttgttcagccttgccggtgtacagagacaggcgaacaccgcgcatgttgatcacagaagacccagagccatcttgcaatgaggcatcaatcgacttggttccaaacccggtgctctgagacagagaatggatagatccggatgaattaacactctctgtgctgggagtgttaatctcgcacaggtcgaggaagacgggtagatgggcgcgaagtcggttgaggttaccggccgtgccacccattatggcggcctgcaaacaggcatcgatggtcaatgggtgaacagtgtagtaatcgccttgatacgatgttcgggcgacacgttgcttgataaccgtttcagagacggcagctgggttgattctcttcttgtctgtcttcatcgacaccagagattggaatgtgggaccaaagacaagcccttcctcggccagcttggagtaccatgggcccattgaccattgctcatattgggcggtatcgactgtgatagccggcaaggactttcggtcgagtcttatgcagcctgtgcaatgtgagactgcggctccagcctgccacgatgagatagcaaagtcataccaagtgctggaggtggatgccttggaaatgcgagctggggagacggttgtgtataaatcagcctgttgatgttcatcggcgtgtacgatcaatgcggaggcgatgttgacgttgcgcaaaacaaatgatgagtcagcctcggcaaggttcttgatctgtgaaatggcctcaatcgccatggaaatgtatccagcagctgggaagacaacctggctctcaagcttatggtcattcagccagggcacctcgttcagtcgcacagtattcttccagactcggtcaacaccgttaccagcggccatttctgatcctagcaattcatgacgcgggtaggggcgactgcgaagatcactactcagtcgtgactctctccacagcagctggctgtagctccagtggtaagtaggaagatcgggaataaccttggccatggcagaagaagtatcgttgacggccatgatgttgatatcatgtccacggatgtaaagttctccagcgagggtctttaggcagatatcggcgtctttaccacggacaagggtagcgctgtatggcgcatcgtcgatagaatattgcaataatgttcgaatctgcttgacgggcaattgtagggctgaatggggtccaatctcaatgagatggcatttgcccttctccaggattctggtaacggctgccgaaaactgcacggagttctcgagattctggcgccaatagctgtgaggcaatactgctgttgtcttacggctgtaccagttgggcccgtctacacccacactcgaaaagaactggatgtctttgtcgatataattggcgggaagagttggccatgcctgctcaataaggcgttcatactcttcaccaatctccttcatcatataagagtgataagccttgccacctgtctgtagtttgcgggcgaattttcctgcctgggaggctgtctgcaagagggtttccacaccggagacgctaccagagattgtcacactctcaggggaattgacacatgcaacaaccacttccttttcgagagaaagctctgaaatcaactctttggcctcttctgcgctaccgccaagtgccatcatggatccttgagatttgagctggccgacaacatgtccccggtaataggcaatcatgatcgcctgggcttcactcaacaatccagcggcgtatgctgcagcaatttctccagaggaatgaccggccaccatttgaggagcgacgccccagctgttaagtaggttgacgagaccgatttgcactgcagtacacagaggctgagagaatctcgcatcgccgacgcgactggtagcagcgggctccattaaaacatccttgatcgaccatgcgggtgcctcaggcagcgtctgcagcacattatcgaggtggtcgatggtgtcccggtaaatcgggctctgctcgaacagttgacggcccatctccgcccattgagcaccctggccggtgaaaaggaaggcgatgtccaatgccggaagggttttagtgaccaatccctcgacgacgagatcagttgttgcagtggcctgactggcaaagatataaccacgctgggacagcttcgatcgacggtttgcgagtgtatgggcgaggtccacaaagtcatagtgggcgccgttgcggatgctatagctgagatcggtgatccgggcctccaaagcttcaacggtagaggcagacagagctagaaggtatttcttctctgcaggttggttatgtgtgattgccttgggaatcttgttgactgaggccaaatactgaatcggatcttccagaatctaccacggttagtatcgcagtattttggattggagagcaaatcactcactgcatgggcatttgcaccgccataaccaaacgagttaatgctgacacggcgcatggcagatggccagttggtaagtttggtcacgatttccatgttccaatccgccaatttgactgtctggttagcatcatgactctcattaaactcggatacaggactcacgcttggggttcaacttggtcacgccaactgtggcagggatagcctggtgctcgaaggtgaggattgccttgattacagcagtgattccactggctgcctcactgtgtccgacatttgttttgttctaggtttcattgttcagcagaccgcgcatttatggttgagttgaaatactcacagcaccaattagcaaaggagatcttcccttgcgcttgaagacccggctcagagcttcaacttccatggggtcaccgacggcagtaccagtaccgtgacattcgacgtagtcagtgtcttctacgaagagtccagccatgcggtaggccttgcggatgacttctgcctgtcctgaaatgctgggctgagtgataccggaggttttaccatttctagaacagttagtatgcttagacgcatctggatcgagaatacatacgcattgacggcgctgccacgaatcaccgcgcggattgggtcgccatctcgcagagcagcagacagccgcttgatatacaaagcgctgacaccctcagcacgaccgtagccatcggcactcgcatcgaaggtgtggcaagtcgaggttggggagagaacgcctcccttcatggttccgagatgctgctccgggcccatgatcaagttggcaccggccaccacagcgccttcgcattccccagccttgatggcgttgacggcgttgtggagacaataaattgatgatgaacaagctgtgtcgacagtgaaactattgatcttgtcagattgaaagaaaagtccattgatagctaatgaccacatacctaggaccgcgaaggtcaaagatgtagctcagacggttggagagaattgcagtaccggaaccagtggcactgtatcggtgcagcgactccggatctctggcctgcatggtctgaaagtccacggtgaaattaccgacatagacaccaatgtctgcgccggcaacctgcttgagggaaacaccagcactttcaaagcattcataaacaacctcgagcagcttgcgctgctgagggtccatgtatgtggcttcaagattgttgatcccaaagaaggagttttcaaattgacgtacatcctccttcaagaaatagccgcccttggtattcatcacaccggcacgatcgccttcggggtggaagaatccgtcggcattgaaacgttccttcggaatttcgcattgaccagttcgctcattgacgagcatctcccagaagtcattgggggaggagacgccaccgggaagtcggcaagctttatcggttagctctatggactcgagaagatggagtaatacttacccattccgacaatcacaatggggtcattggttggctcgggtccattggaaagagtagcctcgagagaagaaacgtcgatagaacccatttcgtcggtgtaaacgtagaatagaattgtggttgggaatggaattgtcaaattcttgaggattcggaataaacttgcacttttcaaactgtgtatatatatcccctgtactattctatataatctctaaatgtatacagcaaggatctgaccaagggtgcagtgacaaagtgacaaggctcacgatctcaccgtcagacgtcaggcttatacgcggtcagatcggtcagatcgacctatactttaaccctcccacagggcaattaagcatcggcaaaaccaaaatgaagtccgttttaattacagggtcagttttgttttgtttgttggatctcccaatattgacgaacgattcagttgtggaaagggaggcatcggcgaggccttggctcttcagtatcgcgctcgaggtacaactcacattcattattcatgtgcaactcattaaaccaatcaggttgcactgttctggccactgttctgccctgggaatctagagagcatctttcttcggttggcatcgcttgttttgagttagatgtgacgaaagatgactccgtccgagccttgcgcaaagcagtcgaggagaagattggagatcgactcgatattcttgtgaacaatgcgtaagttttcgtgacaatcaatcttcgatttggtttatttcaatttaacaatatatagtgggatctgtaagcttctgttgatgcagtacaggatgaaataatactaagaagcaggctatacaatgaccgccatcgacaccgatgttaaacaagtacaacagatgtttgacgtcaatctctttggaccaattcgaatggtaaatatcttccaccccttgctaattctagccaaagggtgtgtcgtcaatattggctctgtcggaggggttgtaccctacatgtatggctgtatgtctatctgaaatatgggttcggctgaaatccacaactgactgcaatgtagcttcatacaacgctagtaaagctgcactacatcactggggaaatacactccgagtggagatgagcccattggggtctgtcaattatccacctctctaccttttcgctcgctaatcgttcgaacagcgtccgagtcatcaatgtaatatctcaagtcagtataatatatgagtttggagactaacaacgcatctagattatatctggcaatattggcaccaatatccttgaccgtgattcatcgcgtactctccctccaggtacgtcggcaacccctgcagtttggctcccaaattgtcaactaatgaaatatgtagactcgttctacgctcctctgcaaacggagttccaagctcatgtccaacgagtgcccggtaagctgaaatattgaatattgttcgtgcaaggtaggctgatcaacagatacaaccgatcgcatggtgtatgccaaatcggtggtgcagcagtcactaagagcatgtccacccgcctggcactgggtaggcaatacctcgacccttgtgtggtttatggatatcttcgcgtttcgcactatctgggtaggtttttactcttcgattttggacacatggcatccactaataataacaggactacgtgctatggcctgtctttagtctggggaaattaaagcgcgcgatgaaatccaggtctatctagataaccaatcgacaattactgtctttcaataagattactagtcagcttccaaaatttagttgaactgcggcgagcgagcatttcgattccagggcacatccattgtagtgtttctgctggtttagcttaattccttacataaaaatagggtaatactcaggtataagatatgctttattcaaaatcgaaaatattataatgttatcacttttctggatcgaaataatccatgagtgttttgtttatattattgtataactctgagcatctagtctatgtaaatcataaagccgagattctgttaatatggccattagaatgtatgacgtccaatctagattgagtctgtgcttctgtgtcattcaaaatcccaggtctgacgatctgacactgtttctgacagtctgacatgcaggatgtcactacttttgaaatatataaaaccgatcaaatccatcgctacctaggtaacatcgagttcaaacagctatctccttttaacattcccatcaccatgtctcaaacttccgggtttcccagtcttcgccccgcctatattctcaaggtgtgttatcaaatgcaaaagcatctcacttgactaataaagagatagctgcaagtaggagagggccagcctgttggtatgaaaatactattgtgtacattacatcgcctcggtctaatcattttctgtaggcgcaacatcttcagggtcgacctttgtccactatgtgagtttccagtctcaatctaccagatgaactgattcctaacttttgttcagagcaccccaggcggaagcatctccactgtagagggattttcacctagcatcgatgccgaggttgtatttgctggcgactggttgtatttcgatcccgatcagcaacatagtcggatgaatgtcaagggtgttgcaaggtgggtttatatctcacgtgcttaattatatgaatcccactgacaaatcaatcagaaccactgaaggcgaagtgagcaccgtcaatatcagcaagaaaacatagaactaatgaactggcagggcatcaacttcgcctattcgggcgtttccggagtttcgcccgacttgggagccattttccaaggacaaccgaagactattccattcggattatccagttagttctttgacataaatctgtatgatataatacgctaacacattatctagccatgaatcccacttttgaggttggtcatccccgtctcaaggacctcgagaacaacacttgggttggcaatggccgattttcgttggagggagacaagttatacgtggaggtccgcatctcgcaggttgtttccagcaaggatatggattagatggactctttgtgttgatagtagcatcaaatcagctcctaaacttgccaattgacccatcaatatatatctttaacgaacaacacatacaaaatcaaataaatcaaacccgcgaaggggcagattggccaaaggtcagatgcctgattttgcagggttgatgcctcaattcgcctgaattatgccttatcttagactgtcaggaatcacaggatagagggctcagcaaagtattcaaaaacaatgaaggtattcccatataaatctccgtatgcatctatttctaggcgctgaagctgcgaccgtacaactaatttatgaggtgggaatagcttcaattcaatggtttatatagtcggggatggttctcaacgctagggattcgaagaaactgatattttgtatggtgggaatagcttcaatttacagttcacgggatagagcggtgtcaaaagcggtctataattcaggcatattcaggcatcaaccctgcaaaatcaggcatttgacctttgaccgccctgccccttcgcagatcataacaaaaaccaggcctagggggaccatatcccggtctgacacaatcgagtaaaaatgaataacatttgagtatgacggataagttactctaatgaccacgactcatcccgaattcgcatgaacggcgccatatcaacatcttgaccctgttccctcttcagctccaacgcagtccgtccgtccccaagatacgaccacatattttcatccaggtatttgatctcgtaatcctcaaaacgaggtgtcttgagcgtcttgagcatatgcagcatacttccagaccacagctgaattcggttgttatacttcatccatgattcacatgattcagcccatactgaatgctcatcgtgccaagtgtctacatggcgtcgccattgtgtcgttacgctttgcttgggagtcaaagagtgcaaattctcgttgctgatcttggcagcgcactgaagcgcatattcgacttgggcttcgtgctgttggatttagagggtcagctaagcatttcaccagagtcgagctcgagagggattcatacagtaatcaaaacggaaccctgggcccagtttcccattggtccaccaatgaagaaaaagttggggaagtttggtgtgctcatgctgagatagatgttgggggacttttccagttagccttcctttctctattctctatatctgtaggtggggtattacttttgcccattcttcgcgcatagtttgtccattcttgccggtcacggtactggatatgttagagtcatatgccatactcagtggaaacaaaagaaactcacaagtgaggtgcgaaagcaacatcaaaaccagtggcacagatgatcaagtcgaattcgtgctcaactccttcttttgtttcgattcccttttcagtaaaccgcgtgattccactcgtgatgactcggacgtcttgatagtcagccttttgcaaaacgacccacacattcaagaaatgaacttactgtcttctgtcaatgcttccaagaagccatcgccgggctgctatgtcagcgcacctactttcagaagatatttgtaagaacttacagtaggcctacgacatccaggcgaaaagtcaggcgtgaatagcttggccaggtcctgccggtctggtccaacacgtgccttaatcatctgggaaatcatctcggtcgtcatatcatgcatgggatgatcacgcaggaagattgggaatcgctcttgcatgactccatcgacagatttgcgatattgcaaaaagcgagcaggatcgttacggaatacttctttctcagcctcggtatagaaatggcttccagccggtgcgggcggagctgacttctcaggttcatcgggaaacaagcgcagatcttggaatgccgctgggggaacaatccattgcgtagaacgtacaaacactgacagtgatttgacgtctaacggtgggagtcagcagaaggttatatcagaggggggccataggagcatacccttgacaatttgaggaatgatttgaatcccagatgaaccagttccaatgactgctactcgtttatccttccagtcaatagaggagttccagttggctgtgtgcgtaaggatgccacgatagttgccgatgccgtcaattttaggccctagaaggattagcaccagatcatagatgcagtcaaaacatgagcatacatttccatttattcaatggcccagaaccattcactagaacatggcatcgatccgtaaagcgagagccgtctttgcgctgcagctctagttgccctacatcaattagttatccgtgattatatttgatggtaggaagacaaacattcgccatcatcttcgcaccaagtagcctcgactacctccgtttcaaatcgaataaaattgtatagactatacttcttggcaaagttgacaaaatattgctggatttccggtcctctggcataatatccactccactccggattgggttcgaaggtgaaggcatatgaatgagccggaacatcacaacccactcctggatatctaatacattgattatttgaattaacacttgtttaatagagtttgtttaacggggggaaaagaggggaaaataaaacgtacttgttttcaaaccaggttcctcctacttcggtgtttctacaaaagcgtcaatagtagatacatcaagtctagcaaggcggttccttacttttcgtagacagtcagttcatagttggatagcatattctttgccttgtaagccatcatcaaaccagctgcaccagcgccaacgtggaccactttgagccgccgtggctccgagtggcttttttcgacatagttgttcgatgtagaacccatgatgaataattggctgatcaaaatttgcacacgctcgaccaaattatttatattaagccttttgggtcgatttctgactgtctgacacgaagcgtcatgcattctgacctgacatgcatctttagcgtctagccgaaattagctaactttccatgtggtcagatctcagcctccatcaaggaactcctgtttgcattgagatctccgatatgcaggtctccggatgaaaaccaatgaatgattgacatagggagaaggaaaaaagaagatgcagaaggtaagccaagctactgaaaatagttgctacacctaaagcggagtaaatggctcatttcctcaacagcttattgtcatctgtagatgagtatggaattaaaggggtcatgcctcgtaaagtgatggcacgattcagctgtcctgacaatttggcccccatcagtgtcaacctttgaaatataaataccatactgaatcatctcacattgaacaaacagaacatcatttgtaagattcaatctaagcactcaaaagttgaagcttggcgatcaacatgcatatgcaaggaaccatggctgcatctcccctgctcttcctgtttggggttctctccttcgtctatctagcagccgcttctaacatctcgtctctcgtgtctaccctttcttcctcctcccagatttactaccccagcgatgctgactgggctgacaccgtccagcgatggaccgcgtgggacgagcccaccttctctgtggccattaagcctgcctctgttgcggagctccagtctgttgtacgttttgcctctgtccttgttcttttccatatctgactatgaaataaaacaggtcaaatacgcttccaaatataatatcccttttttggccagtggtggaggccatggatatagtacctctttcggaggtcttcagaacggtttgaagattgacctaagcctgtttaacagcgtcagtatcgacaaatctgcaagcacaatgactatcggtggttctgttaagttctctcaagtcatgggacctctcttcgaggctggaaaggagattcgtaagtatctagtccatgatatggggtgcggattcttctctctaacactttactaatagaaaccggctcttgtccttgtgtgggaatggtaggtgctactctcggcggtggtgttggcagataccaaggccttcacggtctcatactcgatgctttgaagtcggtccagctcgtcaccgctgctggcgatcttatcaccgtctctgccacgcagaacaaagaactattctggggccttcgtggcgctggatttaactatggaattgttacctcggctacatataacgtccacgatctcacaaacgaaggcaatgtgctcaacgccgactttatgttccctgctagcctcaacgaaacttatttcaacatcttggctagttatggaactttgcccgccggtctgtccttgtataccttggtcatgaatagtccttccgtgggagtaagttctttcaactcatatgctatcagcagcctggctcattttatttagcccgttatcctcctgaacgccgtctatcccggagctgagcaagaaggactcgatcttcttgcccccttcctcaatctgacctctattcaacgcaacatcaccatgattaagtgggatgctgtcgatgacgacgccggtttcggtctagccacggctttctgtgtcaatggtgaaaagcacgacatgtggtccctcggtgtacgctccatcgacgcagcaacacacatcgattacttcagcaagctcgttcagttctgggaagactatccctctgcgtcaggaaccacctggcaggtggagtatttccccatccaagctgtcactgctgttgcggatgcctccactgcctatccccatcgcgagatcagtgcccatgagtaagccttctctgtttcattatgtatccgtgtgattttggacacccatttaacacttgattagaatgttttcctttaacattaccgactcctccctcggcgataagatagacgacttcgcccttgctgccctggagtctttcaacgcgaccagtggctttgatggtgatatgcacatctacgtcagctatgcccacggcaccgagggattggatcccatgtatggtgcggagaagctgcctacgttgctgaaactgaagaagaagtgggatcccaagggtttgttcagctataacaatgggttgcccaactgatgaacgttgtccttgataattagagttcatgttgtattctatattctaggatagtttgccagttaatgaaagatgttattatacgttctactgaccaaatttcctctctctgatcacctgatctgtcactatgaagctattcagagatcatcttatctgcctacggagtacaaagcaatctaaattaattctatcactaccaatcatagtataacctcattctaaagcggcacttaagtagtatagagtagggcttaccgaatgaattaaatatgaccagtaattcattctatttgtggcgcaaatatataaagaagctcaagtcagaatgaaaattctaccattgtactatcgttatgacaaattacgatcgcatttaatcaatcaaatactctatattatgtagccatttaatggcttttttagaattaaagtatgtctgttattggtggtggtagaataaatttacattgattgacagatcaggtgatcaggtgatctctgaatagcttcatattcacggattattaggtaatctcaatataaaatctttgaccctccaggttacaatttaaagatagatggtattcaattgcaacaaaaatgtattgttaaatgtactccttgcaaaatccccgaaatatattctaactaaagctaatttctcatcaactcggctaggttcaagatgttcatggtaaatttgggcgtgattctcatttcctaggtgtgcttcgactcatttttattgctcaatttacgtggaggtgcgtataaatatatcgttcccattcagtatcaagtatcaagtatgataggcagtacatccaaatcatgcacttcttccttcgtattccttctccaactcacccaaaaatccctcaatattctttccctgaaccaggacctccttacagtcaagcaagacatacaacatccgcccagcctgtgtctctccagcagtgatattcttccacttgtgcgccgtcgcccgctgcacactaatgtcaccctgcttcattatgcgtgtctcgccggagtccagggtcaactcaaattcaccatccatcacaatgccataatcgatggacatggcccgatgcatgggcgactccactccaggaccaaaatcgatcatacgtacgaccgtgccgttggtgatgtggagaccgggctttgttttcgtcaggtctgcgttcatatgaagatgtgttaggcttgattaaactaacctcgttctccttggcatatttgatatctttgtcctcgttgaggtcgacggggttctcatgggtggagtagataatattggcaacagcctggttctcacccatgacacggtggtggtcgccattgtcggtgacgaggaagtgacctttaccgtcttcttctttgttgccggtaatgagacgttgggtcgcgcgcagacctggggctgggaagccgtcggtgatgaagttgatagcggcagtggtagtcatgatgaatgtttgtgtaatgggatgtttgatgtgttgggtggatttaaaaagtaaggagatagcaatcttatatatttagaaatatatttctttatgatacttggtacctgaatctgacattatctgacattatctgacaatgacatcggggaacgcttaagcatgacttgtcagagtagttcccccatcaacaatccagctactaccagtgacataactcgctttggggctacataggaacaagatcaaatcagttatctcgtccacgtgtgcaatccttcccattggcacggcctttgcaatcagcgccttcaattccggattcccttgcacggcgcggtccaccataggcgtatcaacccacgaggggcacaggcagttgacacggatattgtattgcgcattatccaatgcttttcttttgttagaaattttctctttctgtccatttaaatcatgtcagacgtaccggcgtttcgagtcaaaccaagaacggcatgtttagacgtggtatactgcgtcaataaaggcgtcgccacgaacgatgaacaagacgccatattgagaataacaccccgcgtagaaccccgatcgggatttttcgagctcacgggcttcagctgttgctctttcatggcgcgagacataaccttggtgagaaggaaagtccctttgacgttcacgtcgaggaagcggttaaattccggcagggatgcttcggcaatctccgctgcgacttggacaccaatctacatagaggcatcagaaaatcaagtagcaagaagatggagagaaagctcatactccagccgaattcaccatgtaatcaattcttccaaacgcctgcttcgtctctgctaccacggattccacctgctcctcattggtcacgtcgagggtcaatacgagtgctcgatatgcagggtgtgttgccaatttcttgctttcttcggctgccttctcagcgctctctcggttcaaatcggcaaagacaacgccagcagctccttcagaagcaaaggccaacgcgcaggcccggccaatcccgctccctgaaccagtaacgagagcaaatccgttgatgctcattgtgcttgtggaaataatgacaatagtgatattttagatgcggttatgctaaagttaaatatttccgttggaattggtggtatcagatgtttcaagtcagcctcaagccacctgcagtcagggtcagacggtaatatttctaattagttaactttcggaaaaaccgggaaattctatgtataatgcgtgtagttgatagagggagaaccatctactcggaacaagttggcttttggggtcgctcatgtccggaatagattatgatgtactttggttcaccctctacctccctttctttcccttccatttccaaatcaaccgatgaactatgccgtgtactttgctcccaagatgtaggcaactcatattcgatccgcacatttggctgtttagccaactcagccagtgccggattatgttgaatcaacatctccactagttcctgctggcttggccgaggcgcttcccgcacggccacgtggcagccacaattgctgcattctaccacatcttcttgggaagactgataaggactatcctcggttgtagtggttgtggtgcatttcttccatggacgaaataattgcttccgtgtcgtgccattgcttctagaagctcccatttcaaagccgcgggatagcattcgggtactccatttgactgggcagcctctggacgacatagattcgttagatgtatccaaggaagaagacaccgcgtagctggatcggggagtgtgtggcctggaattatcgatgtggattaaaacatttccatttttgaattccctgggatgcaaagacggaggagagaccaatgtgtccatatggagaatttccggatccaaggcgatctgatcatcatcagttgtaagatcaaatggtagagagtcgaagtcaaagtcgaagtcaaagtcgccgagttctgcatctgtcgtctgcgatggtgtagtaagtgacatctcgtccgggctccacggaatggtgccttcgaaaggcgagggagtattcacgtcgaaatttgccatgtcgaagtttgcctgccattcgaggtcgatgggaggatacaaagcgtccatgggatccggaaatgtttctccaattgagtttccagcggtatttgccgcagacaaatgagggctaccatctatggaaggcgttaaagccaggatgttgaaggggattggctggttttgcagcttcctcttcgcccctgtaattgagttagtggatggatacagtctggcccaggaaagagaaaaacatacgaagcttgcgttgtgagatacgattttggatgcgtttgcgcaaagctggctccgatatttgactccagtcctctttatcgatcattttatcaatttcatcagttgaagccattttagccattgttgagtgatagatgattgaaggtaatcaagatagtaatcaacgcgtgcgagaagtggatagaaataagacaatttttgaatagcattcccatttatacttcgtactggataagcattcttcagatagattatcgtgatcttgcaggagtataacctctgctgccgttccaacctacaacatgcctcgtgttttctacgagctaaacctcgacgggagcggatgtatgcagtcagcattgaaaaaagatgtcagcaatgatcaaaggtaccctgcaggagagacggtattattactgcattttttaatcattttaacaatagttacggttgttatgctactgtaatactctatttttatatagtattctagagtaagataccataaaatacccgcacccatagtggacaaatcatacaaaattaagtgtattgttacaatacaacggtaacatattcggtaaccgagctggacacgcaagaccctaaagcaccatagtaaatgtgataaatcacaacttgataactatctgtagtctataggaacttttacttctaggttgacgctattcaggtaatttataccatctttattggtttagacatatatccccagcttttggcaacggaattatcggtaatctttgaaatgaccataatacggcgtcctactttcttggtaactgacatatagtactaataagccttatcaatatctatcggcaaatagagaaataaattaaatatttggtttggttgttgggatactgaaacgctgaggtctctggacgatcgccgtcatgcatgaggcggcggacgaggctccacaacctcaccactcagcgagaggctatctggccggccccaaccaacgggaccctaccagagaatttactggtcgactacggagtactccgtacgatgtggtcaagctggagaaaccgggccggtggcaaatcggagttgagaattcacatcagccccgcggggtgccgtacgacatcccacccaacggaccgtcgggttggtccgatccgccatcaagagtcgggtacgggttgcctcggacgaaactaatccgtggaggagatggagtctcagcaaacgaagtgaatcgaggcgccctgtggcctctttcgctccgtttggatgttgacagccggagaaggcagatatagatagtagctagtcctaaccttctctcttcatcaataaaattccgaattgacatcccacctactcccatccaactaatttcagtagctcggcaaccgtcagtcacaagtgtagaatatatcgcatttactatgatgtttaaggtgtccagctcgcttacgtgtatccatgctattggaatgcttttgttacgaataaaggccgagatgcttcttttgttattttatctgtactattagccgacatacggagtaacacgaggacagatccactagcaaaaattccccgatatccatctttccgcccccatacctttccaggtatatggtcgggatggtgagacgactaccccgtggcttttcgcttaatgtaacggttcaatttctaagcaagtcaaagcagatcgggatttccgataatcaagatgtatttttagtttatggaaaacggtccagccgggtcttgtggagagccatttctatgacttctgataaaatgaggggttggtactattaattcactcgaggaagcgcactagtagatcttgattcttcacgggttgtatatgatcaaataatcatttccatggagtgcttcgcatgaatcatgatttctcgcttccagttcatagtacccatgaatcaaacgtaccatgcgtacacggcacgtggcactatgcacccgcttcatccgaatccggtctagttatcatgtaagagaggctgagattggctatattcgtgatgataatgatagaaatgagcgcgaaaatggggcgagaacaatgcaaaaatgggttgaaacaagaattgaatatctattttggccaagtgctacaaaattggaagttgtatgagtgaattagcgttagttatttgtttgggggattttcgtagcgattgataattcaaccaaccgcttgtagatacttacaatttgtatgtaaatctctagcaaaattaagtcacttttatcatatcaactgctttatcatcagggggttagatcatgtaggaatcaggtagaatatcagattcttttgggatcaaaatgcatgtctttttactctgtaaaactagaagtgggcagaatatatggcagaaattatggcagaaattatggtggtacttaattaggaaggaggtactggaagttcaggcagaggggggggggtggatcttatccaagggggaaggtagcattatcaatccctttgttaatatagtaaaacgtcacatcatcactcaaaacgtcaaatcatataaaatcagtatgaaaaatactcctcccgcatggtagaaaacaccttccagatctgtgtcgagcaattcccccttaatcgtcgggcgatttcatctaccaatctgatgacgcgaccttccagaaaccattctcccctcagtggctgtagaaggatagcatagtatgacaatagcagtaaagcacccgggttgttctgtttcaatagggccaggtagtcaggcgaaacgcgcattggccatgaattaagagcatcccagatactcggcgaaggtccgcaagtcttgataaacgcaaaagcgactgccaatttgacagccgaatcgcggtatatagagcattcagcggagtcggattcacggtccggtatgacggagagtagagtaattagaagtgggtcgttggggtcggcagtgacgccgagatcctctcgccaaagggttgtaaaaggtgccaaggggccagtactgagttccgtccagacgggacagagcatggagcagccgttacgcagtatctcgatccagtttgatgacggcgcgtcttctgggttatcatcattgctaagaaacaatggttcgtcgttggattgggagcctagggtatagacgacgaggaagaatgcaaaagccaacacggcctggctattattactatccacgtgcatagttgcccatcggaatgcaggggctgcctgattttggtgtcggattgactggatcgtgtaatatactcgattgggtggatcgataaaagcaaggtggatggcggaacaggataggattccatggagtaggaaggggaattgcgtgcctaactggggaacaatgattcgaaatgcatcatctgtctccgggccgcatgtgaggattttgtaggtatggttctggtaatgatcgagtaatcctacgtcggttgtgatcaacggttgtaagggacatgattctccatgattcgatcttgaagctggagttgtcacagcctaaaggaataaatcagttggattgatagtggctggtggtcattatcttgacttacggtactcggtagcccatcggaactggcagatgatgacgacgagatcaacaacgctgggttggtaaagtagcggaaggcatttcctcgaaaaaagctctgtaatggcactgggtcccagaagcctccgttatcagaggctgcgatatggtgaacagtcatccagtgctgcttcatgcgcttggttgtaacacaaagatgagcacagcgagcaaaggaacaggctagcccattttgtatgggcagtaaaggcactgggaactgggtttcatcgggcaagacgacatcattaggttgggtcagttcaaatctagaggcgtattcgatgaatgctcgacgcgatgaatgatgaagatggtggatttccttaagatggcgagcgacagcaccaggctggatagcgtagctgcaacgccggcagatcaatactcgatatgtaggcagataatgtaatagctcgggtggagtgagcccatccactgattttaaagtcatggtgatgattgcctatgaagagaaacaatccgcaaagatattcttcgagtcatttcagggggccaaaatcataacgagttagcttctcgcgctgttccaaatgccaatgaatcacgatacgttgatctaggcgggattgggaatgttagtcatcatctgatcaggtggatccgtttacggcagcaagtgaatgcgacagctttctcatttagaagtataggagactacctaggtaagcacaaaagacaagaagaattgaccaaggacagcacattacgcatgattacacaaaagaatcaaaaaaagaacccaaacgtcttcacaagaatttaaatctgcgacaacaccttgtcaatgtcaaccacaggggccaactcggagattgtctccttccacacctgtgcctggatgattctgccagaatcactgtctccatatcctgcaaatggagcctgcttgttgtcactcaggtacttgccattagaggcatcgccagccaacaccgatgagtgaaccagggtacgagcgcccatggagacagagcgaccgataactctcttcatacctgcgagaactttcccaaaggcaccctcagccgtgcggtgcaactcagagccataacagaaaccagggttgaccaagttcagaatggcgcccgtggagcgcttggcgctggatcggttgcggaacagctcaaggaagaagagctggtagagcaacttggaggtatagtaacgatctcccatgtcgaaattggccttgtcatccaagacttggataaggggaagtccctgcttgatagatacctgagcctcggggaacttagcccaggcggctgtctcactgccgacgatggaaatcaccgggcgagcgcggttgaggttgttggcagcctgttgatcaagcacgggtaataatagcagcgtcaggagagccgtgcttagccaattgatttggatgcttgactcgtgagaggtgggttggttgatggtgaagttgaagttggcaacaccggcgttgagaagagcaaagtcgacctgaatgtcggacttcttgaggcgctcgacaaaggcgatagtactggcatagctgcctaagtccagctcccagacctcgaccacggggggcttgaccgaggcgggaagcgaggcgagaagggagtttcgggcagcttctcctttggagatgctacggacggccaaaatcaaatgggagagtccaaggccgagaaactgggcggaagcttgatagcccaggccagtattagagcctgtcacgatacctgccttaccgcgaagggaggtggtggatggggctttggaagggcagaccaagaactggcgatagaggaagcctgggtaagagttatagaaaggcattttgctgagaggttggaaggggaggaatatgatgagaattgaaattgaaaggcgtcgcaatgcagggtataaatactttcgtccttcattttctatgttgtgcttgcaacgttgtcctagatgcgtacatggatagatgtgggggcgaatcgacggtgccgttccacgctgtgattggtcaggaataatttacacagaacgggaggtgccgttcccaacttcgccatcagagcttgaaccccggagaagcatctgactactagtagtcagactgtcatgctgtcggaattaaggtactgacgggtttaatgggcttaatgggtttaaggtagatgagtctgactccccttctgacttttttggtggtttcaagtaaccgctcttacccactgattccgtgagagatttttgatttgcgagctttcgaaatggcagggatgtctccggtccatatacccatttgagcagaaatctaatcccgttgtccggccgggtacgcagacatacctctcagggttcagagcccctttgaggactgatgcgttcatgccctattttggaacggcaggaaaattgaatcatattgtatgttgtagttagttaccattacatatgctttaataatcaaagtatgcaatcagtaactaaagagaagtctgacctagcagacaagacaggtaatgagacaagacaagagtgacacagcaacaccaccatccaaggaggtcagctagtaagcgtagtcatacagaccatagcaatcatccttctatcctaatagaacatagtcctgtaaactccttttcattcccttttcattctgtgtgtcgtgtgtaggtattcctcctgtgcgctgagttctaactatctgatgattccgggtttccccattcggtactccgtattgctggcagaactacccgtaggcggtatggcacaaagcatgaaggcggtgtaaacttgcaaacgccaaccacctccaaaaacagagatgcaagaatttgtatggtgccaaaagcttcatttaatacatggataacttgcattacactgtataaagcggtgtcaagagtggtgctaattagggcattcaagcatcaaaacacttcctaaaaggggctatacgtctgcgtagaccgggatttgtaaacatactagacatgccacatttgtgatagtcatatattggcaccatgtgtgcatgatatcctggaagcaggaatccatccacgcactatcgcataaatcggacattcccatcacatttaatagtaagtcatacctctctcgggtttaatggcaatacacgagccacgaaccaagaaacttctatatatatccaaattatgtctatcgcattcctctattgtatcatattttgtcatctcggcattgactagagcagtcacactcgctgcaatggcatattttagcttctacatgcttatcttggtagttaaccctaataggagatgatatgcattgatctcacattcaacaagatatatgtacataactccactaccaggctgtcataccaccatcgacccgaatatctgcagcggttatataggagctctcatccgaagcaagaaagctagccacagccgcgatctcctctggctgcccgatacggccaatcatgatcttctgcgttaaatccgatctccattgcgggtcctcaagcaaaggtgcagtttgcagagtctggataaggcctggtgagattgaattggcccggataccatgctcacgcccttccatggcgaactgacgtgtcatggcaataacaccacctttcgtagctgtgtgggcgatagccggcactccacgaattgcaatccagccgttggcagagccaacgttgatgatagatgcacctgactccttcagatatggccatgcaacacgagtcaacaggtagacaaggcttaactcctggtcaattgttttgtaccagtcgtcatccttgccgtcatcgagccagctcatgtagaccattgctgcattattgtacagcacatcgatgcgtccatatgtttttatggctaggttgacaaattgctcgcagttctcacgttttgtgagatcgcatggggacatggatatcatttcaccacctagctctcgtacagctttgatggttgctgcgtcggtcacagtgttgatgtcacagccgacgattttggcgccttcttcggcaaacttgagggctgctgcacgtcccatactaccgcctgtaccggtgataagacatatcttgttcaacagacgcggtgccatgacgattgctttgggattaatatatgtcaagaaaaaaggatttggacggtggcatgagagtctttctgagaagagaagaatgtcacagagggcagggtcaagggggggccggttagcaagactaaaagaactggctggttagtaaatatctatttgaatgtttgctttttcggggaacccaatcaagaagacttttgaatcttttctttgtttgttttcccacatcaaataatgactccaccggctatcgaaccggaaactcagtagctgcatattgtggctgcgatacatgatcgatggagccgattgcgtccacgatggacgatcggtccgaattcgatagtgtcgatttggaattgtctgccagcgccttgtaaccgaggcttctcctagtaagttagctcttagtggaccaatagcgtacaaaagaaatagtatatacccctggatgcccatgaatatcaacgtcgcctacttcctaaatcagaacactaagctggtttggggttcttgatgcggatgattgcaggtcggaaacttcgagcattctttgggcttttcaagattagccaatatttctacgctctgggtgggcacgagaaagcgctagagccagaccatgtatcaaccctaggcgctgttcataatatcggggtcttatatagtaagcaagacaagctaggtgaggccgataggtgaggccgaatagatgcttctgcggctctaactggacgtgagaaagcactaggaccagaccacacatcaactctagacacatttaacgctcttggagatctatatcatgactaggggagactggatcaagccgagcagatagatcccgcaagaaaaaagaatagccctgcacctgccttttttctctggtcatctctcactatcatagaaaaaagaggggttgtgcaatgcgagccagagaaactgctacgaagatttaattgatgcttaacttcaattgatttactcccatatcgtttcgtcccatagcagcaaaaaaaagtgttaaagccattttattaagatacccttttgaaagagcgcatcttttgggcaaaaacaactgcgtgaccataaatatttgctaacaattaaaacggggaaattatcaatttaatttgataaaaaaaaaacaatgggacgagccgggatcgaaccagcgaccttgcgaacttcagtcgcacgctctcccaactgagctatcgtcccatttgggatagagataaaagcttaattaatattataaatcaaaaatcttttgccggtgtgggctacatacaaaacgacatagaaacccaccatagcccacggtttaaaaatcataagaattagatagtattacaaatgatgtctaaaaatctactcatcttatatatttacatcgttctcaggcttcttttgtcttgcctcgcctcggttggtgctgattcggatctcgtacacgtcaacagtacaacaaatcgatactatccgaattatccggttgactaatatgaaggatatatattgtaataactagttaaataaatcgggtcccatatatggctccatagagcaggccaccgaatcaaggatccatatcaaactccggattgacccacgaaggctgtggtgcttttgcacgcatccaagccccaaacatatgcagaccaccaaagaccaaaaacccgccaccaagtacaataagtccttgggcagtgaatgtccaagtccaaccggaagacgcttgccaattggcaatgaagaactaccaagaagtcagttatcaatatctaaatagctcattatcaaggtggattggacaacataccggattgataaaagcactcaggttcagaaatacggcgtagaaagtgatcacgctcgttgtttgtagtgggtagcagtccacaatgtagctgctggttacagtatttccgatctggataccagcggcaactagaggattgtcagcactgcgtcgaatgctttatgatataatccggaagatagaactcacataggaagaatgccacctggcctaccatccagtggtagtttttgtcgatactgattccccaaacaaccaacccaactataataattattattatcagtagagttcaacatatagtctggaaagtcaaacacaccagtggtgatcaatatagccgggtacgccagccacaaccgcatctccggaacgcggatattgccattcctcttcgccaacttctcgacaataaagtcacttaatcgcccagagcacccaatctccgagaggacagtcccaagaaatagcccaaggaacagcagtccctggatcagaggtgtgtagttcggatacgctgccggtaccatcgtgataacagataaaacccaccagtaccagacgaagctgaatccgacaactgcgataaccactgtggataattggaacgtcaatacaaaccgagtgatggagtcccacggcttgggatggcgcattccgggaataggacgccaattgatgaaagggaggttctttgtgcggcgtagctcggagggtagggtctccggagacatggatgtcgccgtgtcgtctcctgctatttgcttttcaacatcactcgggagagctttgttgccgtcaagacggggcatttgctgaagcatcttgttgcgggggtagagggtctccggcatgaagaagagttcgagaagtagtagtgttgcaaagaggattgcgttgaaccagtttatccatggggcactgacgagatccaaaaagccgccaactggtgataaatcttagcttttgacgcatggtggtttgaactgtccgaacaacttacaggtaggacctagaagcagaccagcatcaattgctagaacccacaagccaagcttctgaccacgctcataatcatagaacagatcggtcactttgtcaaactagatgtcagatacaaatcttgtctgaaggtgatgattgagacataccgactgccattccgactgtagatgctgggctcactccaaatccttggaagaagcgagcagccatatagcccgaatagctatcagctccagcagccccaatagtcgaggccagtgatatggttgtcccgactaagaacaccacccgtcggccaaagatctcaccaagggatgaccatatgagtggtccgacggataatcctaatgctggcacggcgactgtccagttgacttgcgaatagttgatcgagtattgatcttgaatctctggaaatgagggaactgtggtggttgtgaggtatgtgaataggaaatatctaacaagggttagcaagatgtcagcaagacgtgtagattgttttctggcaatgtcgagcaattcccggagctgatttggtacatacttgaacataacgatagatagtatgccatttttctggaggcttgaccaatttaatggatctagggggtctgatgttggctgggggtgaagtctgattccgttcttgtcgacggctgcattgtgaaggacttgagtgccctccatgggagtattggttgggtcgacatcgtcgttttggttgtctttttctccaaactcgcgtttgtcatcgatttctgttgggcaagatgccatcttgtagactcttgcgtttgaatacgtatccaagagtatataggccggcagatgactatgatattagagcccgccttgatctgggagatgatatatataagacatatatactagatctgtcgattatctgttgccatgtgctgaaccaagctttggctgtctattggtcgtgctgccggggggcccggggtagaatctcggaatctcctgatgaaagggcctagctgataagcaccgcattagggtttctataattccacgaagcacgtttcagcctattacatctaatgagcctcggattgtgaaagccatggcactgcatactattataaccattgttttgattataaaagtcgtccttaggggaagtcatatcatctcattcattaggtatacaactaaacagtcaagttacagtcaaattgtggccattcccttcttgctcctttctgtgtacacaaaccattagaatggttatttcataactatcaggattatcattgctgcaaaaagcccgccactatcaaagtgacaggagtgctgaggacgttgtctgcatgcaccaatcaaactggccagagacgatgataagaggcgaaagataaggcgctctagtcaacttccacttcgaggcaacaattagagaacatcagtggacttccccgtgttagagatcaagactagattgatctattcgatctcattctccaatcttgaagccacagaagtgttggctctaacatgttcgcgtgttgtataccgaataccctgccgcgtcgaaccgtccggtatcggacttggacttgagatactcgaccaacagaaaaatacacatgtcatggcgattattgctttgattatctcaatcatactggctatgtattatgtatccattgttgaatacacatgtagcgaattttcgtattactgactggtaccagatattcgtgcatatacaaactccacgctggccgtggcataatcttgaaataaattcacactttccgaatcgaaagcagtttgctaacaggaagtattttcgcttcttccaactcccttgcttaacaagtggaagaactcacaccgtactgtgcccccacttcctaaaaaccatcacatattgaagccggagccaaatttactacgaagcacatatcgccaattccatcatgcccaacccctccagcaatggaggctcaagtcaccaaccaaccgagtatacttccctcctcgccaagcccatcaacgatggaccaacattgcacgactccgaagatgaaagtccattctcgcgagccctcatcctcgccgagttctggctcttgctgaaggactctactcccgtaatcttagcctacactctgcagaacagcctccaaacgatatcggtgttgatcatcggtcgctcatcaccggagaacctcgccgcgagtgcattctcgcagatgttcgccatggttacggggtggatgattgctttaggaggtaccacggctatggacacactcgcctcctcctccttcacgggaagctccaacaaacatgacttgggaattctgcttcagcggggcttcttggtcctgggtcttttttatatacccgtcgctatcttgtgggcttgttcagagcctgtctttttgttccttgggcagagtcctcaactctcacacgacagcgcgaggttcttgacttgtttgattcctgggggtttgggatatatttatttcgaggttatgaagaagtatctgcaagctcaaggtatgtttgcacgagattgatccgggtatggatactaacatgaccatcatataggaatcatgcgagctggaacatacgtgctgctaattacctcaccattaaacgccggtctcaactacctattctgctacacattcaagatcggcctcttaggcgcacctctcgcaacgggaatctgctactggctctcatttgcattgctagttctctacgcacgcttcatcaacggcgcagagtgttggggcggatggtcgcgcgaggcattccaaaaccttcgcacctttgcacgactcgctcttctaggcattgtgcacgttggaacagaatggtgggcatttgagatcgtcgctttagcagctggccacctgggtactgtctcgctcgctgctcagagtgtcattatgacagccgatcaagttctcaatacgattcctttcggaattggagtcgcgacgtccggccgcgttggtaatctactaggaaaacgagatgataccggtgcggcgcgcgcggcgcatacctctgccgtgctgagtatggtttgtggtggcgttgtgctagctgttcttatcgggacgcgggatcactttgccaagatcttcaatgatgattcggatgttgtacgtcttacggctgaagtcatgccgtatgtggcgcttttccagattgccgatgggcttaatgggagttgtggggggagtctgagaggaatgggacggcagcatgtgggtgctctggttaatttggtgagttattactgcggtgcattgccgttaggtatctggcttgcgtttcatggctggggacttaagggtctgtgggttgggcagtgtattgctttgtatttggttggagtgtttgagtgggttattgttgcgcgcagtcggtgggatgtggaggtgcagaaggctttccagcgcatggatgtacatgagactctggaggatgcgatttgaaggatagtagatatttgattggctaaagaattagctatacatagagtttgtcatctcaattagatagaaattgaattgttcttggcgtttacaagtccgctagatgcgaagtattacaacacatcacagatgcgtctaacggttgtactgtgaacagcatcgcattcaataatacattacaatatactatactatactatacaacatccctattaatatcctccgttgtcggacaagcacactaccagatgctggatttagcagatcgccagccaccaatgacgaccggccgataagccatcgcatatattaataaccctaaatacatccccagtcagttatcttccccactaatatttatctcacgttcccactcccaaggacttcccttttgggacgggatagctttgccttgcatgatgtgcccttaaccgcatcccccaccaaccgaggctccacctgacgtcggttccttaaagggaagttacggggagcggggaggataaacgctgcctgccagtggcaaaggactttctctttgtcttgttttcccgaggttgactacaatcttgagctcatgagtgcagatagtacgattgccgagttcctgtcaatcgtgtctgtattagggcaataacggtagtggattactatcgcgtggcaagctggaatgtagagaataaatatcttagaatggatgactacatatatcatggaaggccctgcattttagcactatatccaaacgacttgtattcactttgacactttcaagttcttctctacataaatttgagtcttgatatcacaatgattgcctccatcgcgggcttggttgtcctctctgctctggtcacagctcatggtaaccatgaccagtctcaatcccagcttgctggtccacacgaaggactctggtacaacacactcccaggagatggcggcaagcaggtgagcagcccctttgataagctactcaactcaaacgaagccattcactaaacgaacaaggccgactctgtattctccggaatcacaactttcggccgcctgccctatttcccatgcctggccagtgatgccgagaaatacgacatcgccttcctaggttagtcattaccagccgatcgagaccatctcatacaatgcccctactcacatatctaccgaacaggtgctcccttcgataccggaacctcctacagacccggtgcccggttcggacctagcggtatcagacaaggctctcgccgcctcaatctctagtatgtaccagcccgggagacagagatggttatgcatggcacgaacaaggctgacgaaattatccttttagcggtggctacaatgtgcctttggaggcgaacccgttcactagcgatatgcgaattttggattgtggcgatgttcccgttacttcgtatgtttgcgttcgacgggagatacaaagacaggaaactaatccgacatagatacgacaacgcctgggcaatcaagcagatcgaagagggacacaacagcatcctgatgcgcaagccttaccttgatgctgataaacccggtctttcgcgtgctggcaagacccttcctcgtgttattacccttggtggtgatcacaccatcacactgcccttgctgcggagtatcaacaaggcctatgggcctgtcactgtgattcactttgacagtcatttgtgagtactcttagcattacagcatggacgattgactaatttgattagggactcgtggaagccgaaggtcttcggtggctctcctactcaggttgcgggtatcaatcacggcacttacttctaccatgcggcgatggaaggattgttgaagaatgataccaatatccatgctggtattcgcacgaccctatctggtccttccgattacgagaacgatggatactgcggctttgagattgttgaggcgagagagatcgatgttatcggtatgttatcttgtcgcttccaaggttggctctgtactaataagtgtcaactttaggaacggacggtattatcaagaagattcgcgaccgtgtcggaactgaaaaccccgtttatctttctatcgatatcgatactttggatcctgcttgtaagtcttgtcggagatgtctattgtgggttgtcggtcgctaataatacaatccagtcgcacccgctaccggcacaccagagactggcggttggtccacacgcgagctgcggacgatcatccgtggtcttgacggcttgaacttcattggtgcggatatcgttgaggttgcgccggcttatgataccaatgcggagttgtcgacaatgtaggttgctttgagtggtggaagatataacaaatactgacttttctacagggctgccgctgatgtgctttatgaagtccttactatcatggtcaagaagggcccgttgactattggggagtcgtctcatgagctctgagggtttgtggagctggtgggtatgtcattgtggtgtttgggagcacggacttcaggctttggtgtaacgagtattggttgaggagagaaagagaacatcggaaaggagttttgcatgtcaaagaccaaattgaaagtgagacatgatgatatggtggccgaggcatgttcttgtccacgatggcagttactatatacaatgtaattagattgcattgaaatgaaataaaatgaaccaatgattttacggtaccccatctggacacgcccgagaagtataaatcttattgcgatgttgtatattcaatcaagtcaaagggatccttcggtatagcgccttgcaactcccgatgcggtaagagtccggcccaactccatgccattttattaagatacccttttgaaagagcgcatcttttgggcaaaaacaactgcgtgaccataaatatttgctaacaattaaaacggggaaattatcaatttaatttgataaaaaaaaaacaatgggacgagccgggatcgaaccagcgaccttgcgaacttcagtcgcacgctctcccaactgagctatcgtcccattcgggatagaagaagatcaccaggttgataccatgattaaataatacaggatggtcgctttcctagggttctaaacggcatctacgaatgcaatggataaccatctcgcagtacacgagtgcctattataggtgcatcctaatatctttgaatactaccggaagatattaacgtagtaactcaatctactaagcgatgcaatgtatgtattaaggcctgagaaccatagaaagacgtaggaaagaaactgttatatatatgcagttggtgctttcaacaccagcaatattcctacacgagctcatgcagaaataaacccagactgtccgccaaaataggtagatacagtatagttatgccatagcggggtatcacataagctcatcatcgtcacccatatcgatcaactgcgtatgtaccagcgtttctccgatcacaaccaaatatatattgtaaccattgcggcgagtgccaggccatataaccttttaatgaacctcggaatgaaactacaaataagtggacatgattacaaaaatatgaccatggacctcgtatgacttcaatgtatatattcaaccctgcgtttgaattggaaatatattttgaaccgtggatagaaggcaattagtttcgtgattattcaaataataactagtcatatagcagaaccgagaggcacaaatatgcatatgcctattatgaaacgaatgcacacacgcttttagagggctgaatacgacttgaagaggtatcctgcaagtctgaaaagccgtacagatgatattcgtagtagtaaagtatgatacaaggtcttagatactcaggaggacttaggagaatcagataagaagtcatagttggttgcctttagtttcactagttcttggctctaccataatcttcatcaattggaattcaaatactgaagatgacatcatcccagatgagtcatacgaggtccatggtcatatttttgtaatcatgtccacttatttgtagtttcattccgaggttcattaaaaggttatatggcctggcactcgccgcaatggttacaatatatatttggttgtgatcggagaaacgctggtacatacgcagttgatcgatatgggtgacgatgatgagcttatgtgataccccgctatggcataactatactgtatctacctattttggcggacagtctgggtttatttctgcatgagctcgtgtaggaatattgctggtgttgaaagcaccaactgcatatatataacagtttctttcctacgtctttctatggttctcaggccttaatacatacattgcatcgcttagtagattgagttactacgttaatatcttccggtagtattcaaagatattaggatgcacctataataggcactcgtgtactgcgagatggttatccattgcattcgtagatgccgtttagaaccctaggaaagcgaccatcctgtattatttaatcatggtatcaacctggtgatcttcttctatcccgaatgggacgatagctcagttgggagagcgtgcgactgaagttcgcaaggtcgctggttcgatcccggctcgtcccattagtttttgcttgattttttagatcaatcgacgtgtgatgtccgatctataagcctcgatttgacgagagaagatccctatgcacgcgggtggctagttagaaagagcacaagcaacggaggtagtatcaggaagcactttgagttcggcaacaagtttctatagaagtgagaaccgtaagtcgacgtcttggccttatttattgatagcttgctgtagacgttggattaaatggcgcacaagatagttttggcgaagtacctcgacagaattgggcaagcagctgggtgtgcagacgatgaatgtgcggacctggcttgggtcaatgatgtagtcattgactggagtagaatgttagaagctgacatcggatacggagtatatatagggacttaggattaatggaagacggggtcgttgtcgggatcggaacgaggtgtgagcccagcgtcaagacctaatcccctaaaataactatggaaagagaaagtagaccgcaaatcccgaacataaacaataaacatagcagtaaaattgactacatgactatgaccaaaccgaaaagccacagcgggtatagaaaacactttcattgatcacattgcctcagaagacagggatatcacggccacccctccataggcagcggtacaccgtcccattcgttgccctgcgtcgcaggaacactgacctcctcctcgcaagtcccattaagtatctcatcagcagcaccaccccagcccatagactcaagttctcgaacaaagaaatcacgctcttcctccatcatagacgcaccctcttcaccgcccatgacatccttgtactggcgcagatgccaccagtgcgtaagaccacgaagtgcctgttccaacggcaaagcctcatcaacctcagcatcgacatcagagccagcgagccagtcgtcgcgcagctccgggcggcagtacaggtagatagcggtaatgacgcgcatgttaccctggcgccatttgcggccgcagtaggggacctgggatttgaagagtttgagggtgtagaagcggagatacgggtctggaatcttgaggcccttgcggagaatgttgcttgatttgtactgcactagtaagaggcagcggtgggctttgttgcgcgtgatcttttgcatgatgtgtaggtaattgatggcggagaagaagttgcggaaggagaatactttgattggttctttggggaggggcgcggttgggtagcctagttcgtcgacttcggggcgtgtcggtccgttgaaaatatccgctagggattcctcttcggagagacttgccatactgccgtttgccgttgggtcgcggtggcgggagattgggggtggcatggcttcgtcttcactttcggtgtcgccaccggagttttcatcggattccaaggggaagtccgtgttgttttgacagaactggaagaaactagtttttgtgttagtgagcgagctagcgaatgagattgagtaacctacgatagatcttcccggtcattcttatttgccaccgtttggtcgacgtcttggtgtgcgaacattttgagaatcaaggggatatagttggagtcgagtagcagctgtgtcatgtattcgaatttcaagatatcttgatgagttagcggcagatcagtaagacaaaaacacccagattttagactcacgagatcgcttaaaccacttaaggagaagtaacagagttccagacacggctttaccggtgatctcgcgaagtcgaatgttgtctagctcatcgatggatgcatcggaaaggagattgtgagagccgttcatggaatgaccgttactaaaacttatgttagaacgaattccttgttattggaagtgtctgagctcacctcatgccctgcgtagtctggctagtagcctgactgaccactgcgctgacatttgtcaagatgattttcaagaatacgatggtgatggactgaaggtgagatagagtatgggtctggtaaacagtaagcgaatgtcgagattaggtctcgaaaccgtacactcacataaaacgagtcaaccgcatccaggcgccgctggatatcaggatcatctgtctccttctctgctggcttcggtttaggctcggtcttctcctcgtcacccaaattctcctcgtcacctaacaaatctagatgttcgaagtcatctggcaaatcatccgaaatgttgtcagggaagtgagcagcgtcctcggaattccagccacggtcgtactgcataaagtgttcacgctcctgccaaagctgtcgcatcgcacgagtcattttcacatgggtcgagaaaagctttccggcttcaataattgacgcaggaacatcactgccttcccatttctttccaaccaaggcatcctggcgttgcgttgtgcccttcccgccaatgctgttgctagaatcatccagaggagggtacatgaaggggaaattctggttggtctgatagttctgtttcttcccagctttccctcctggtccagcgggagatggcggtggggacggcgccggggttgcaatatgaacggcctgttgaaggatagagccatttccaccggaaatcgagggggcaacaccacaaaagataccactggacgagttcatcttggctgcattgtgtggaagagggggtagaatagaattgttctctagttctagcggaacgacaagtggcggagggttgtaagctgggtatttggaagtgatttcctggcggaagagatgatagtccagaggggaggcgtataagaatggtgtcctgcgtttggcatcatccttctcagagaaaacatcaggctctagtacttcctttgcgcgctttaaatcttcgataccgccaaagacgagaagcagcgacttccacaacaacagcaggatcctggtcagcggaatattggcagattcgtcccagcgcagtcgagcgataatttcaacaatagagaccaatagattgggattggagctggtcagtgcatcgcggattgagctgcactgagggtcgcgcgcctgttgcctgcgacctacttctacggcgaagtataagcttgtgaggaccaagttggcctcacgctccggggccgcaatatcgccagggttaattcgctcgtaatcaatgtcactagtgtcagatccgagtgctgagcgggtcttatcaaaaaggcgacacatgtactgtaccaatgcagtaacgcccgagcattcctcgagaagggaaacattctgttcgatgcactgaatctgcattgactttagcagtggcgtttcggctgctgactcgggatttagatcagaaggatagtcgggtgccactctcccaccgctaataccccatacaccagtgaccacatagcaaatggtttcaagggcctccaatcgcgcggagacttcagaaagcttcagatcctcgagcatccgagtaataaacgaacgacgtaagtctttagaggcctcaagccaaggcaccccgggcgtgtctcgctggcgtcgctggcaaaaggtaggccatttcttgttaaaagtccctttcatgcccatcaacatgacacgatcaaaggcgttatactggaaccactcgtcgagctcatcggggaaagattgtgcatcggcatattcaaaagcataggctggttgctcgatcttgggcatttcacccacaagcttccgcaactccgataagctcagagagctcgcaccccggtccgtggtctcctgaacgggagctggagggggcggctgcatcggaggaggtggagcagagccttcacgacgaagttcaggtcgtttcataaatttttcgggcgcagagaactccgtctcaggagcgggtgcggcttgcgaggcctgttcctggcggagcccctcagcgacctcctccaagagttggtcgtctgaaactggcgagatatcggtcccagtttggtcgacctcatccgccttgacaatatgatgctcctgcatagtggattcgggtggatctgaaggcgcgtccatcattggggacttgttgagttgttgtgttcctggcagaaagttgttcggtggatcgatcaccagggtaccaacgctccatacatcagtgaaaagagcgaaaagaaggaacgaaaattagacgaaactcatgtaaatggaccactacacattttgtaaagtcttcgcaatgcacgaggggtgtggctgcggtgttgatgcgggaggccagctgacacgtgaccggactacaaagccattgtgtacgagatttacgaaatagatagaaagagtcagaatataattgatatcaggcagttaaaatcaacaggcaggtgtccgctcgctactatggtagtatacgctaaaaggggctatcccttactccgacttcttcccactgaggccgagacgcttcaacctctgagactcccaccgttgccagccagcctcagccaagtcttcacttaagacgagatcacggattctgactaaccgggacacagtgctttccatggcccattcgatcaacccactgcttcggagcaggctggtgaccatgaaccagccgcaggcgcatacaaatccagcggcacagccagcaaggacttgtctcggggtgtggtagttgaggtagacgcgactggcagcgacacctgcagctccgatgcaaaggcctagcatgaccaggactcgtaataggacggcaacattggggtatgagctggcggaagcttggctgtgacggaagagaaggaagaaggtgaggtagacggagaagaaggtcatgaattgggcgtgtgaagatggcattccatatcccttgccgaacatttctgcgaattacacgtgttagttttggaaggtacccagacgacatcgccgacttacccttcggtcgctcttccttgatgaaacgtttgaggacaaagttcaaggcttcacagcccatctgccctacaaacatcaggataacttccacctcccttgttgaccagatcaaggttgcataggaaacgcatagtgcctgaggaatcagggctagccatgctgaggcaaaggacagtcggtcctcagggttctagaaacatagtcagtggcaagtcaacagagatatgatgacataactaacgtagtggacatgagtcagagacaacgacgccagcggagtgtctcccataatgaatcaaaagagtgaatggagggaagttcgaaagttccagagacccctaaattcgggagatttccatttcagggatatcccgatgccaagcctttttcccttatcggcgataagcagattgggcagcggggacttccagggcttttcgacttggcgaattatttttccttcatatcttcaggcatccgaggggatttgccattctttttggggtttttggtttcttcatatcttcatctcttcactcgtctcccttctagtcacttcactttcaaacaatgacgccgttgttctctatccaaaccccagactctctattgcatcatcttttagacccctcccgactttcagccgaacattggcccatagaaggaatactcggcacctcttcgtctttggttggtctgaatttttaccaggatctcagtcacaacgctgatttgaagggaatcttcctgcaggatataaacctcccttttgtgcccgatcgtccttagtgacagttcacttgagatcggtcatcattaccttcagatttttttacgacagtcatgagccagcgttgctgagagtttttgcaggagacaccattgtctccaacttgcgatccactagcgttataccggaggcaaatatataatcatccccacctgagaaatcttcacaagtgatcatactcggtttcatcccgccatgaccgaactcgactttccagaggatgagcgctcagtcgagctttcctcgatagctgccatctttccagagattcaaatcgatccgtcctctccgttcaaagccgttctcgatcttccagtcgcaccttcctccccgacctcaatatgttttcagcaaccgcttgatcctgcagctgccgccatcacccctccaacctcattggacgagtctaagggagaattagaccagccgcctattaaagacatccatcttctctcgcacctacctccgcttaacctcgagattgaattgccagagggttatccaaccgaaaagccgcctatcgtccatctaaaaacgatcccctcgtggctacctccctccgtcatagatcaattatccaacgattgcaaccgactttgggaggaatgcggaaaggatctagtcgtctttacctatattgaccatctccagcagctggcagaaactgctttcaatatccagaatccgtcgggagaaatatatttatcgcgggacttgaagatcggactactagactacaacaaaaatgccgagcgggaaaagtttgagcaggggactttcgaatgtggggtatgccttgaaccgaagaagggcaccatttgccatcgattacttcgctgctcccacgtattctgcattcaatgcttgcaggatttctacaattgctgcatcaccgagggtgatgttgacagtgtgaaatgcatggcgccggattgcgaatacaacaagagacctgtagctgtaccgggcgacggccagaccccgccccgcaagaagcgtgatcgtactctgggaccaagcgagctactccagattcctttggaaactgaaatggttcagcgatatgcattcctcaagaggaagaagaagattgaagccgataaaaccacagtctattgtccacgacaatggtgccagggagctgcacgttccaagcggcaccccaagccagaagatcctatgtcggatgacttggatagttctgacgaagaagatggatccgaggcccgcggcgaagtgaacgatggagagcttcctcctatggcggagcgtgtgtctatctgcgaagactgcaactacgcattctgctgcgtctgtaagaagggctggcatggtgaactggtacgctgtttcccacgccgcgacggcgagcccacggaggaagaaaaagcgaccgaagagtacttgcgtctgtacactaccccttgtccgacttgcaatgtgccctgccaaaagcaaatgggatgcaatcacatgcgctgcttccagtgtgacacacacttctgctacctttgctcggcctggctgagtgcagacaacccatacaaacatttcaacgacgagaaaggccaatgttacaatcgtctttgggatttggaaggtggtgatggcatcaaccccgacggggctgaagcacttcaccgcatcccagacgcactcctagacttcgatgatgacccacctgtggtagacattcaggaagaaacagacgaaagtgatgacgaccaccctgcatttgaatttgatgatgatgaagacgaccttcaccgacatcctcctcctcccgcacccgctccgccccaaattaaccgcggtggcggcagacctggtcaacgtgaccacgcagctgcccgcgctgctgcggctgaacgtcaggctcaagctcgcgcaatggccgaggtacgaaaccgaaatgcgagacgacaagccagacgccctgttcgctgggcggaagttcctccccaccgtctccctccacaggcaggtgatcctagacgtcctgtacagtgggcagaggttccagcagaaccattggcagacgaagacggccccatacgatgggaggctattgcaatccgaccaggtagagcgcaggcacatcctggtcttcagcgatttttggatctagtacaaaatgaccgtgaagacgaatgggatagtgatgagatggacgatgacttctagatcgaggatctatgtgcatgactcaacattcaatggcacataagaatcttggtctttccctgttcaaaaagcgtcttaatgacattgatgcatacaacgacttgatgttccttttcatttttttcttcacattttccccttcattttgattgcgtttttcatcaattcccccttcgtcttctggcacaccccgttgcgtttccctctttgctttttttttggattttcttattctctgcttcattttcatatactagctcttctctggccaagcgcaggaaatgcccatacatactcctctatacatacaacgtgcgttgcttgcgcttcgtctatttgatattctgcgtttatatgatatctccataattctatggttgtcgatcgcttgactccgtctttctgtagcgcgcatgggtatacaattcctatgttaataaacccatgcataccacaacgcggatccttcattataatcctccatcttcaactccgtgacagtcaatcccaacttgcaataggtttcacaaatcttctcccatacagcctcacctatactcttcgtgtaatcggaaccatccgagtcaggatccatacatgtgctcatagagctcgtcataagcacgagatcaaagttcgcagtcataaccctccaatcattattaatctcattcgtgaagagacgttgggccggtccctcaatattaagcggcgtgttaagaggctcagctccacccagacaaatcgcaataaacccggaatgccactcataacacttcaattgaacaagcaattcaaacaacgtgcccatacgaagaccctcatcttgccgcgctgccttttgttggtaccaagaaagacccatttgcccaatccccttgcgaaaccgtccgaccgtgaagactggcggttgttgcgtcagcatacggcgccagctcgcttcaggccggagatatatctccatcttagccgggcttttcgcgagatcgaattcagcgagtttgatgtcctctattctggcgcctacattgctgctattttgcaggtcttttgatggaaatgctgatttgaatgcttgtgccagcaatgggttgtagactcgtgtatctgtcccgctgttttcgctggctgggatgaagaatagggctttttgcagtgagcgtgatgtgcggattggatctgcccaggtgtgacagacacgttgggcggcgattagggtgcgcatgtccatttggtggaggattgagatcacgatctcgggcatcgcgagagccctggtctgggctgggtgttgggtgtgcatctatagtctgtgatgcttttgtaaaattgaaacttgaattccagttgtataatgagctgcgctggtgggggctcggggtttttgttgattgcttgtccgagtcagctgggctgagacccttccaaggttggaagcgcttgactacattgtacgcaggggcataggagccagggttactttcggatttaataatgcattgcggccttagtgcctgtatttcgcctgatgttggccttaaacctgaccgctttcaggccctacctttattcaggaatctatatgtattattttctcttaagagatatccataattgattagatcgctattatctctgagttcaggttcaaacagcccaagaatcatgcggtgtatgaatttgcatggcagaaatagcctcatattcatggggccagatgcgcgggtctccgtaattgtaattcaggtaacgtatttcactaccgagctgcacaccaccgagctgcgcagcccaaaacgccatagtaaatgcaacatattccacatttatatcttaacgaccacttttcaacttgctttcattacttgtcaataggtatcaataagcatttttttagcaatatatctcaatttcaaataaatcggaaagttgcatcattgcggtattgaaggttgcaacactgaactataggaaatatctatatcacaatcactattatatagagtgatcagatatcatatagagaataatgggctacaagataaagtttacattgaccaccgttgttgcaatatcatgttgtaatttatcgcttttactatggtgaattgggctgcgcagctcggtggtgaaatacgttaactaaatccgaaagtaaccctggcccctatgcccctgcgtatacattgggatctcgccgtttagagtcatctgtaattaattaatttatggactttgataggcaaattgaagcaaatttatctagaaaaacatacattccaaggggccttccaagtcccaagcttccagtgagggtagggtgaatgactaaaattctgcctggcaataaattccaataggagagttatgaacctgtggcatacttagtcgcccgtattcgttcattatactacgtgtatatgtaggtacaagtagacctttctgattggatggaagtttgaatagcgattctcgaagtcgtgagtcaggacctgcaagatcacgaagttgtcagggtggattgattttctagcaaagcaccggggaatgcattgggttgggatcgacggctgcgctttggctacatagtatatggggatattatcttccaaggttccaaagttgatatcgaagtgggacccgtggtcttggaaaagaaaacttagttttaggtgactgaacataagatttaagcttattttgagcggaaccaattaggcttatttcggttagagcctcaagtgaccgctgtacgaattgattacatattttttcatactatttatcgactaccagtattgaatttgaggtggaatactgaattagatactccgacgggtagaacatgcctcttgtaatcaggtttcacgaagcgtaacctaatttgatcatcagatcaacctctccagtcgtgccaaaactcatagctcatgactgtgagatcagagaatagcaaaagcaacctgtaatgtcgagaaggatggtaaccatgccaggtctcatgaggttggtagatttccgaggcataggcgtgggtttcaggaattgtaaggttcgggtcttcggagctagggataatatccgggccagagggactgaaagcccaggattcgggcgggtttgcgacataaggttcatcttcatctgggttgagtagacggtggttgaatttcaactgatccttggggttgacatcctggggaatacaagggacatccggtggtatctcaaatccaggcatgggacttgcagcaatacccataagaggtagtggtggacatccatcgtccctctcctgggtgatgaaagggagaagccagtctaggcgaaaagtgtggccaatttcttcctgccatgtaagagtgatgatggcaactccaccggcctgggaggcggcaataacgatcccaagttcagggaggtacttgaccaagtttaagcgatcacaggagtagaacggagaatgctctaccagcgaatcaagtggagaccgagaaaccgtccgcaatacatggtctaatggataaggattcagagtgatggtatttccagaaaaatggagaatagggaaaaaccgagggttggtcgctgagtaacaggttagcattctaatctaacaccgaagcacgtcgctcacttacgatggtgtacagagcctgtcaaaacatccacttcagcagcaggtacttcagcagcaaaatccgggccccattgctcattttcttcttcaaccaaattgttaataccacgtctcacgcgaatcgagtgacggcgcgaagccacctgctggtcttgtgatacttcagagctgacatcagtagtgtcaacagtatcgggaggagaagctatttcggaggcttgtagagtggtattgttatgctctgagctcaatagttgcggtcggaattcagtatgaacacagccagaagggaaaatatcgtcttctagaaatatgctcgaaaccgttgcatgttcctcagcagcgattttctgagaagcgaggacggatctggcttcgacataatcagccgcctccgtcacgtcgaaaaccacctgatcatccatcatggttcgctttgggtcacatccacaggcatgaaacttgaggaggtgctgttgaaccctgcgaggatgtaaaggcaaaacgaaccaccccttttgctctcgaccactctctaaacaatcgtaactggagatatcgacaggacttaagctgtcccagactctccatatggagacgttgttgaggatatcggtacttatcatccacagaccgttggggtccaattcaaagttggcaaacgacacgcatggaatgttgtcaaaatgacccctataggtgagccgcaggttgcgtgtgcgatgacggggcatggaccttttcagaccctgcatcaactctgcattgtgtattgacacccatgtgtttccagagcctcccaaatttgaggtctcagaggaattgggactgctaccatcattttcagacaccacatccatcaaggcaaaagcaaagactgtgatatcacccgtgttcgcgctgacggcgatcaaccgagaaaacttgtgggtagctaagccccaagcactcaaataaacatgttcagcgaagaagggctttatttcatgcgcatcaaatggtcggccgcctccatatttggcgctcctattgattgccgagaaaatagcctcaacattgtagccggtgacgtttccagaatctgtcgctaaaagcaaaacctcatcaacccccaaatcatcaacaatgatatgattgattgtatgaggcctagagcgatcgatgtatccagccgaatcgggttccttcatcaccgggtgaatgatcatctcaggttgggagccaaggagctggcgaggtccactgggaatccatacgtaaatgtcttcaacttgagctgtaaaaagcagatttcgacgctgcgagaaggccgccttgcaaaatcaaggtcagaactggggggggattatacgaaacagcaactagattagtaggtactcaccagattacacctccaagcagagacagttggcctaggcacatcactatagctcaatgataatcagtcacggtgattcaggtagtacaaacgtaaatacctactcaggaaactagcacaagtcagttcatagttctcacgtggggtaatttgaagacaaacatacgcgttcctcttctgcttcgatattcaatgcttgtacctggggccgatatcgtacgaattccctttccgttttagcacgcgtagagctggtgggaggaaaagacattgctgtaggcgaaggatgcttgcagagaagaatacttctttggatctgagcagcaagagtcgtgaatagtaagatatgcagcttgctctgtcattgccaattgtggagagaacaagccacaagagacagaaggctgggaactttgtaaacagatcatgattaagctggtcgcaaacacctccatggctgcggggaggtgcaatcattcgatgatggaatggctgaccgcccacgcacggaccaccattgagtgcgtacatacctagagcttcgagggcttaggctttctcctccgtataacacattctatcgcatgatggatttggttgctggtgtacgcaaagaaggcagccggtaagttcattcgctggtatcatccttttgtatgggttgaaggttgctaattttttgtctcagcggcggccgcaatgagttcaaatggtccgacgtccaaagttccgtccaccgcgagaactacttaggccactcggtgatggcaccagtcggcagatggcaacaaaaccgtgatcttggctggtacgccaagggtgatgaagaagaggaagaacgaatccgcaaagagcgagaggaacttcaacgtgtcaaggaagcggaagaagaagcaatggcgatcgctctgggcctcccggtgccccccaaagcatccgaaaacgccaacatggtccccttagggggcgctagtagtaccgatgtagtaccaagagaagaagcgatgccagatgtcggaacaacggaaaaggaccatcgctcgagtcaccgacacagacgtgagcgatcccgaagcccgcgacgtgaaaggcgacatgaccgggccgacgatgttgcacgtgagaaggaccggagacaccgccgtcatcacgacgaccgagagcgccctcaccgcagccatcgctacagatcccgctcacgatctcgcggccgagatcaccacagacggcgctcagtctcccgttctaggagtcgacccagccgcaaagacgaagaacatcagaaacgacgacggatggagcgcagctactcgccggctgagcgtcggcgacaccccgaacgcagacgagaccgagacgactatgatcgccgccattgagctacagaccagggatatgaattgatgcattagcttggcgttggagggatcgattcaaatgccggataaaccattgcgtaccactatcagaatgaccactatctaatctacgtgacgaacattttcacatcgagttcaatagcttacaactcgtcatgagtagtctttccgaatccggccaaatcaggcatggacatcatgttcaccaccatactagtccagccggtaaagtgctgtgttcgctggccattgcccgagtcagggttgtactgttcccaagcgaatccagtcctcttccactcgcggaagacattttcgaccaaattcttccgcaagtcagagtacatctctctcgcctgttcctggtgaggaccagaaaccgtcgcagtgtcctgtgaaggttctgtcagattcggcgggcaaataaatcaaaagatcgaagcacttacatagagattcttcaacaccaagtagttgatgttaatccagacaggacttctccaatagttttcgtcggtttcgtagaacttatccttcttgcttaagctgcggataccgtaatcactccacagctcctcgggatcaccgatcaagtccaacacagccttgagacgcgggctgtcaggacccaacataccagtcaggaaggggaagatggagatgtaacccttgtggcagacgtgcacactctcttcatattcatcaatggtcgcatcgcagaaggtttgctccttctcatcccagtgcaagtcatcgatgttacgagtgatagcgttctcgtaggaggcgaacttctcagcgtcttcctcctcaccaaggttctcagcaatgcgacgcatagcgcgagtcatcattcccatccaactgatcaaatcgacatgcagctcaccggggtgcggtggctgggctctggggtagtcatcgatgccagaagtgaggatgtgctgcactgaacgtccgcgccagcggtaaccttccttagtcgagaacgcttcacggtcatacgatttgatatcaccgcgctgagtatttctgtaccagttgtagtgcttcttcaggagcgggtagaatgagcgaaggtatgcttcagacagttccgggtgtcggacagtggcggaacgcaggctggcggtcgcatcttggttgtctagggatgcgaactcggtgctcttgtttttactggtcttgactttgtccataaatgcttccaaggccataaatagagtaggcgggtttgcgtaatgaggatattggaccgtaaactccgcaggtaccttgctgcgtgcctcttggccgagaatctgttcgcgggcaatccacccatcctcgtccattaagtggaaccagctcttgataatctcaagcctgtaaaagtcagtatcaggcaaaactagtgagtcaaacgaaagtgggtgtaaacgtacgcaagatcggtatcgtattcgatcacgggcatcaaatggaaaccttcgtcccaaaggaatcctctagggaagaaaggccgggagggaacgcaagtgaaaagctccttagggccttcgataacaggctgcgcggcagccctggcctcggcggtctcttcccagaagccttcattctcctcttcgtacgcagggtttgcggaccgatctacgacatcatcgccgtggaagaacccaatgccaccgatcaggttagataacattgccttggagaagctcgagtatttcggtgagtcaaatggcgcctgcggcggaagaagctcctcaaaggtttcagaaaatgaagccgaagcttcatcaatttctttagtaagggtttctgaagtcaaaggttcggaagcggatccggaggagaataggacatcgaactcgaatggaccgctgaaaaccttctggacaagctgagcgtttcccgggccaggtttgtgcttgatagtaaacagctgggccgggggcggaatgttctcttttccatactcttcaagggcttcgtcaacctctgccttcaattgagtgaagaagattcccttcgcttgccaaagttgctcctcagggaaagccacactagctacaatgctgcgatccaatggcttgtctgtggagctaggatgattgtagcgagggtgcgagttggtttccggtccagtggtgacatcgatagcgaaatcaccaagttctgcggagtatccttcgagcttgacattgccttccactccagtggattcagaggatgcagaatcggcctccaagcgaccgaatccctcgagagtggaataaaagataacggagatgggctggtcggggtctgcgccctccctaggcgtgcccttgactcggaatccccagctacctccgtgctggccaccgggtactttgatgaaatcgatgaccaagtccaaattgttcccagcgtcatgaatggtttcccgtccaccttttcggatatcgtactcatcccagccatacccagccattccttcattttgttcgcatgtgtgtctaaagtcttcggtagatgttagctttaattcaccaatgcaaccgggctgccaaggatcacatactttgttgagcaccagcataatcgtcaacctttccccagatcaaccccgccgaaagactcttcggaatgcgaggacgcaccccaaagtagagattcgacttgtaggggccccaaagcaaggactcgttgctggcacgtccggcctctcgaattaggacggacacatcattgggatcttcatttgcaacaatcccagtcgcatagagaagcgacgtcaataacactgaaatcccgaggttacgcattatgtagcctcattcaattgactgctgtcctccgcgcggcgttaagctataggtgtatgtatctccacttaccgcctactaaatacagactagtctcatatgcgtaccgcgtcacccatacccgcctttcctcgtcggctctagtgctcacgttgtctacaaactataaatgtcgtgctcatatcatagaaagggtgtactatatttttgcgatagacattgtgtgacaagtatctattcagatgaagtttcgtggatccaacgatccaatgtttgcgctcttcgccttgccatcaaatacaaactcactcatgagcttccctgtacccggcgcattctggataccccagcaggtatggccagctgcaacatacagtccctttacatcggtcaagccaattagtggcccaccgccagtttcacagttaggaagatagcaagcctggcgagcgcgaacctctccgtcgcgcagctcgtcagaaatgctacccacatgatctatgatttcctggcagcgcgtctggtcaacctggacatctgcagaagtctttggtaatgagaccgttctatctccgtcgccacatgcatagacggtgtcatcagggcgcgcgtagatctctggcgcagccacagttgggcgtgacttcttttcggggttgaagtcggccgggatttcgatgtttgtaaacaggcagtatgcgctgactggtttctttggctggatcaccacgctgtgggcccgcatgcctgagatggggacctctgggaggatagtcttcgtccagggaccagcagcaacgagcacatcggttgcggtgatggtttttgtttcacctgatgtcttatcagtgtatgtcactgactgcacagaacccttggaccgatcaatatctgtaacctgtccaagaatgatacttgcgccctcgtcctgggcgagctttgcaatagaggtagtgaagaagtatgggtgcacttgagcagtttcgcccggtccactcatattttcataggaccgcagaagatccggctcaatccaatccaagtcctgggggattttggcagacttcagcttcgacatagccgctgcactgcgtttcagcagagattccctatctccacccccggatttccctgcagtgtgctcggcaagagcacgacctctcacgacgagttggccacaattgacctctctgtatccccatcgattgataccatcgtgctcttttgcaagttcggcatgcagtttgtagctgagaccaacgatgttgcttgggaaagcccattgcgccagcatgccacccgctttgcctgatgcagcgccggcgatttcacaggcctcaatgagtgtaatcttgtgacgggtagggtcgtatgacgggtgtcttgtgaggtaatatgcagagcagcatccaatgatgccaccacctgtgaggattgtggttagcaagttgcgaataaacatgcggggtaggaaagtcgcgcaaacaatatgttcttaccaacaataacaatctcacgccgatctcctgttgctgacatcttaaattttggcgttaccttgggtgctaatgatcgcaaagaagccactgtgtagagggttagttgtagttgacaagtttgaacagcaggtgtgctcatatatagagaatgcctacgtcactggggatctagtctgtccagtcatatgtcgcatccgcaatcaagtcgtgaccggtttttatctacagatttggctatgaatcattgaatttttttggttcactaatatttgaagtaatgaaattggtagtaaatccacaaaggtttgggccatagaatgggaaggaaaaatatcaagccagcataaaaagtactccgcaaatgcatatcgtgtcgaaagaaggcagaaaatgtccagtgaatacaaagaagtgtgagaccgtaggaataggaaggatttaaaggttcatcgcgagggactgagaggccggttgaaaccaccctggcggttcatgtactgtcggtactcgatcttcttctccttccgcacaccatagatgtcgttaccggggattttggtgttctttgtagtccggaaccggctgaaacccatggtctttcgcatttgtgcttccatttcgtcttcgcccgcatcttcattgaagtccacgtccatcgcatcctcgtggcgatctggtcctggttgtgcgccattcgccttctgcccaacatctcgcgatcgagggtctttgcggtcgccatggcggtcactcttagggcctcgagggggtgaccgggcctttgtgccattgcgatgcggcgagcgggagcgcgaacgttcgcggaacttgacgttcttgggtgcattgcctgatatttatatgttagcatggcacgagtacttcaataattcaaatctttcaccaaccgcgtctatcctggttgcgctcccggctagtgctcctctttcggttctgggccccacgcccatctctgtcccggtcgcggcgatctcgagaccagcttctatctcgccttccatccttgcgttcttgtgagcgagagcgataccggccgtcgcgtcggtcatctcgtggagctggtgagcgtttgcggtcgcgatctgactcttgctctggtgcatgaggccgtttatcattcgaatcccacatagttgagctgtcgactcggcgagcacgttttgcaggtggctccgccattgttaaaaaggtctggtctagtctgggcgttgccccgtacaccttgggtgtttgaggcagctggggccagatgaggatggctttactcaaatttcaagagcttgagtaatgataataggtttaaggagccctaaagcgaatgcttgtagggatagaaatgtagagggtatcaagttgtcgcaatggatgtcggcctgaatctctcaggaccagagagaagtttattccggctccgggaagagacctgtcgtgcattttgtgacatggcagattgaccgatctatagccgtgacaaacaaattgtacggttgggattcaattttaaaactgctttgatcagtgtcatcaatagcctgatgcatcgcttgaataatcaaatgtgatatatctaaatgaacccaatgaaaccctatatgtacgagaaggagtatatgacttacgactgcactatggcactatctaagtatcttgcgcgatatatcgtaggtttatatggtatctcactacctatttcaccctattaatctacatttctcacctaaattcttcgtataattgataaaagcatttaaaaaaacatccaaaaagacgtccaaaaagagtactacaaaactaatattcttgttaatttaaattgctctatagggatagagcacgtataggtatagaaagtgttaagaatacagtaactagttagagaacaatttgaagtaatttgacatattccattgtgtcagattgaatcaaactgaaggtagcaatgcaaagcctcatagttccagatataaagtgatcgaagtggcacagcgaaaagaaaaatatgcaccaagttagattcagaaatcgatttctgctatattgataccaagtaggcccaaaaaatgtgttagatcggtagatcatggattgtttgaatcgctgattgagacaggcgatgttgtaaaccgtaggctgtccactgacgcactttcaaaacatgcctgagcactggatctcagggcactagccttgtctttgccttgtttgtcaggtgagctatgtatcatagttgcacctaacgacgatatagcatataagcaagtagattgcaaatgcagatgccaatttgaaaaattaggcatcaaaagggatgaagccatcgaagcagatgtggaaaaaggtgattctgactgtccgccacttttggagttggtttgaggagaacacctggcacttcatgcttgatcccactggactactattttgaccagagagataattgtcacgtaggagagcactttgaggcctgtcaggaacaatcaaataaatctgctgtatttattaggtccagctcctgtagaaaactcgaatggtagagaagtcctgtcgtctcaatactttcctccatatgtagctttattgaccaagcataaattgagaggcgcagccaattatccggtctcagggaaagtaactggagtattggagaaaggcctcatcaatttctggtgttttctcaccgatgcggctcatctccgcatagttgaagttaccattcatccaattcgcagactctgaaaccaattcagtggagggctgttcaattgagttgccacttctcgcaatggcggatattgatgattcctcattggtagagcttgaaaccaaggggctgggttggagtttgagatgaacggtgatagggtctaccatggatggcagagtttgccctattttggtaagtaacaggggaagaagccttcgacggcccccgggaaggtcgtgtatgagagtaaagaaatgcttgagataatcctgcgggccaagcttgaagcccgaagaacgtagtctagccgttgagaggcatgccatgacatcaatcaaggtgcacgccacctcaaatattttttcaatctacagtatgttagaaaatgcttggtatgtttaaaggtaagccatacaagaccaattccgtgagtttccatactctgcctggataatttccatgtcgcaaagcagagatcttcagcaattaggagggggtagcgaaaatccatgcattcatgactaggctttgtcgaaagaaacccagcagttgtagatagttgccatatcatgatacgcagccactgctgagacacacgcaagtctgccatgagtatatcaggcagatcaaggtctgccgggactgcactttggataagctcctcaaggcgaaccagcgactcaatcgagcatgtggcattcgttccattccactggctcagaaaactttcgtcaaatgggcggtagaggtttaccagacaccgaaagccaatggctgatgcattttctagtacattgtcttccaattgagttggaagtgggtcgtcttctaatcgagggctttcgggagtgacctgtagcgtaataggtctatgtcggcgaatagcgtgagctctgtcaccgtgttagcgaattactaatgaataggcgaagaaaatacctctcggacacgactaggagccaaaacaatttgcctgccaaggaagggtcatcgtcatccacctgcgccgatgatgcttgactttccagtgcgctagctgtataaagtgtcgtcgattcgcggagaaaataatatgcatgccgttggtttccaagtccaatatgacatccatacagaaggaaagcgatgataatgctttgccgtataggatccgtgaatggatcgatatgctttcgagcttcagtggcttcctcaatcagggaatttcggtagtcttcggtacaaaaaacccgagagaattccaaagatgaatgctccacggcaaatccggtttgagtgaccacaaaagcgcagaaagcagtgactagacaataagcatggaggcatgtatcggcaaggtccacccgtttctgaaagctgccgggttgtaaaacgggcactgttcctctcattcgcgagaaaaaataccccgagcaggcgttgacaagctccccgctcacaaggcccggggttttcgcgaactgacatcttcccgaggtttgtagtgactggggagttggtatagtatccccgagccctagagccattgatggcggagaaatattcgcatcctgtgccagcgcctgttcaatttggtttgctctgagttcattgagaatattggctgtttggccctgtctccccttcttctgtcgttgcgaggaggttcggcagaccaggccagcagctcgacactgctcacaaggttttgggaaaatacatttgactttacgtcggcgacatgcatcacatgcttgcttggccggtgggtctggcatctgggaattcaggtacaaatataccgagaggaactagcagaacgcaaagatccggggttgcggggggaagtcggggggaagtcgggaagaaatgggaattgtggccttgtttgtcaggccccaacatccggtagactcctaattcattctcttccctgtatccattgtgacttaattcgtagtactagtggagactatgtttctattcacattgtcattttgtgttcagaaaagaagaagccaattctaaaggcctagggaaatcccctcaggggtttcctgctgagctacaagccgtggaatgctgagaaattagcgacatcggggaatattataaccaggcgtatgctacgcagaatattatcctaggaaagcaagatttcaacaaacatttatagaaacatattgctggttggtattctacgggatatatctcagatataaacacgtccttcgaagggcttcagggtttccagcaatgaatcggagtagttgcccactagcaacttcatacccgcagtactcgcagcctgtgtgaatggctgagatctattagtaaagttcagaatgaccaatgcccgtttatcttgtctcgacttgacaaaacaaaacgtctcttgattctcgtagtcaagtacttcaaatgcaccgtggatgaataactcccggtgctctttcctcagacgtagaacgtttttccagaaagacaacacactagatgcatcactctcctgtctcttcacattgatctcaccatagagatcatgagctcgcatccacggtttcccggtagtgaaaccagcatgttccgagccatcccactgcatcggcagcctggaatgatcgcgagccaggattcgaagaccatccatgatctgctccttgcgagtaggatcggctccactctcactgcgctgctctgcttcccggtaataccccaatccttcaatgtccttgtattcctcaatgggccactcgcgtggtgcattgatcatgccaatctcctgtccctgatatatgaacagagtgccagtcatagtaatcatcatcagagccagcattttggcagagatctcccggaactcgggtgaatccgatccaaatcgagagacagaacgcccgttgtcatgattttcacagaaagcggtggtccagccatccgttccctcaataaaagactgccacttctgcacaatggatttcatctttgtcaacttccacggcgtaaagatgtacttctcctctagggtgggtcccatgccaatatggccgatgtccaagtggaagaccatactaagttctttagccgatgctcccacatattcgatgacgttcttgggatcaggtgtattggctagttcgcccacagtcatgacatccccgtacggagcaaatgactcttcatacatttcgcgcaggaactcgtgaatccgggggccgttgcaccacattccgatggcgggttggatgtaacttttcgggtctgtgatgggggcatctggaaagtttgtatgcttgctgtacttgttcactgtgtccactcggaaaccgtcgacacctttgtctagccagaatcggactgcgctgttgtagatagcctcacgcgtggctttgttattccagttgagatcaggttgttctttggcgtatagatgcagatagtattcttgcgttttctcgtcccaggtccctacatgaaagcatcgtgagttcaagtatactgattattgccaaatatttcaactcacatgtacttcccgcaaaataaccgcgataattgctcggaggcatccgatttcctgcctcatcatatcgaggagggcgccaaaagtaccaatcgcgtttatcattgtccttgctgctccgactttcctggaaccaagcatgctgatcactggtatggttgacgacaagatctagaatcaatttcatgcctcgcgagtgacacgcttccacaagattctccacatcttgtacggttccataagcagggagaacattctcatagtcggagatatcatagcccatatcgtgcatgggtgagtcgtacatcggcgatagccaaacgacatcaacccctagcgactgaaggtaatcgacctttttgacaacacctgggatatccccccagccatccccgttggtgtcatagaaggaagccgggtataccttcgaatcgaggacacaaaagtcaatactgtgtcttgaggaataccttcatgttctcgcaactaacctgatagacagtggcttctttccaccagttatttgtccccgtaggaacaaccgtatcctgtgtcgcatgtggtgacattgtggcttgacacctttattttccaccaggacacccctcttataccttttcatcataactcggcatcaattcggcctgggcaaacgtgggggtagaccctgcataccgccaagcctccggatggatgctgcgcctccgactaacaaccgacttgccgccgacaggctccgtcctggcacgctgattcgtcacatctagacctccacactccggcttccccagtttttcgaatttttggaagcgagtgacagcccatatgcattttccccggatacgcgatggacgtggactaagtcatgcgtgtatcttggacttgagatcttttgtataaatgacgcatcgccccatggtttgtcagtcctgataatgtctgaagtattgggatagtatcagctttcgattctgattaggccttgacaagaaactattgttcgaatcttcgaaatcgcaacacaagttccaatggtgtccatggacgacgaatccgcgagcatggacggcaaagtctcccctgtccttgcagaaggcagactagcatccaggaaggagcagtccatgactctctggcaggctctgcggctatacccaaaagccgttggctggtcagtcctcctttcgtccactctgatcatggaagggtacgatctcgcattgttgagctcaatgtacgcatcacccgcgttcaaccagaagttcggagaacagactgcctcggggaaatgggctgttccggcatcttggcaatccggcctttctaatggggcacgctgtggtgaagtcattgggcttctgatcaatggtctggtctctgagcgcctgggatatcgaaagaccatggtctgtgccttgaccaccatcacagcagtcatttttctgtttttcttcgcagtcaatattcagatgttgctggccgccgagattctcgcgggtatcccttggggtatcttccagactttgccagccgcatacgcctccgaggtttgtccggtagtcctgcgaccttatctgaccactttcatcaatatgtgttgggtatttgggcagttcgtggctattggcgtcaaccgcggttctatttctcgcgatgatcaatgggcctggcgcattcctttcggtgtgcaatgggtgtggccaatcccaatcattatcggctgtcttttcgcacctgaatccccttggtggcatgtgcgtcggggtaatgtgcaaggagcccgacgagcgttgcagcggttgacatcgtccaatgaccccaactttgaccccgaagagacgattgctatgattcaacacaccaatgagttggagaaatcactttccagtgggaccacatattgggattgcttcaagggaacaaatcttcgacggactgaggtagtttgtcttgtctggttagtgcagaccctatgtggccagaatttgatgggttatttcgcctatttctgtgtccaagcaggactgcctaccgttcaatctttcaatctatccctgggacaatacggcctcggcgttttaggcacaattggatcgtggttcctaatgtcctacgcgggccgacgaactatccacatctccggtctcgccagtcttttcgtccttctggtcatcacgggatctctttcttttgcaccgggagacaacaacgcagctaaatgggcaatcggcgtgatgctaatcattttcacattctgttatgacatcagcgtcggccctgtcacatactctctagtctcagaactatcttccactcgtctcaaagcaaagacgatcgtcctcgcccggtgtctatacaatatcagtaacattgtcgtcaatgtcctgaccaactatcagcttaactccacagcctggaactggggtgctcggtgtgcctatttctgggctggtacgtgtctagcctccctggtctgggcattcttccggctccccgagccaaaaggacgcacatatgaggagttggatttgctcttcgagcgcggagttccggcgaggaaattcgcgaccaccgttgttgatccatatgaaggagaggcgacagaggtccatgaggctcatgcggataaagattgaaagtatagcgatgtatccagtcccccgggtaatgccagatatgtaatatatagttagggtgttgttagtatagttattggaactaccaaaaatatcacaattggcttttttcgttcttccatctcacatcgtattaaatgtcaccactgaaaaaagaccgcaagtcccacattatccattacactacataatcggaaactatattagaccaataagctacgccataaacctgagtcagtctgactatcggatttctcatttatgcttacacatattgaagttactcgattcatgctctgagtccacgttcttccatgagctccaatcggtactctttagctttctccatagtcataaggggctccaggtgactttgaacgatatactgtagctccacttgtagctttgccaaagcctgattcacagcacgaaatttctcttgttgaggttcaaagctgggaagaatagaagaacgggtatttatttcctaatctactagggtcggtttcctattgtcaattgcatttacaaggcacaaggaaagataggacaggatgggtaagtgcgctcaattgatgtccgagttgacaaataaggaagtagagaccggcgtaacccgtctgaggtgattcaccacctttctttccccatgataactcccttcatcaccgatacgctaacattgtctgtctattccgtttgttcacattgttttcgaagcaccttctgtctgccccacagaaatggctagcccgcgggccggctcgtggagcctcaactttaaatcccaccacgaaattttcgcagcacaaccccacttcctatgtggtcgtcaacctacgtctccagaaagcaattagacgagaagagtatttaatatcaagaaaagatggcccctatcaatctttcacacaggcgaacgcacaacttactcttgatttcgaaactcttgagcttgcgtgacactgcatcgcccctcacgcttgtcttagattctttggagcaaccggctacgccactcctgaaagaatatatcagacgtgcaaaggtatattggctgaaaattataccactagcgacatctggctcactaggtacggggtggacagccatgctgactagttcgacagctatccaaagtccatgtcacactcgtcgcttttgaaaccctgaagcaaccggatggagtcgatgcttttgtatcaacacgccgcaagagccctgccgatatagttaaagaagtgagcgcagtttatcagcctgttgcagcctccaactcctcacgcagtaagcattgtggatttaaccccgctagtggacgtatacttactgcccgagtagggcgtcttatcctcattgactctattaacccccttctgaactcaaaaagagtcgaccctggatttgatttaccctccttccttggctcgattattgctcccacttcgccatcggccaaggttgatgtgtcactcgtgatgacacatcatcaagatgtccccgaacttccacagcaaagtccctactcaccatctcctatttctgtgttgacatacctcgctacgagcatcatcacacttcattcgttctcgcacgttctagcacagaaggctgctcgcgaccgcagtctggctcctccagtcttcgggcttgaggaagagcaagaaggcattctcctcggccgattggacagattggctggtactggccaagccgagggaattgttattgaactggagcacaggcggaagagtggccgtggtgtactggaatggtaccttctcccgcctgcctcacggtattcgccacagcatccgaaagagatcgtgacgttgcttgacgataatgttctgtacaatcctcctatggagcgagatccaagcgcgggtgatgaggaaccaacgtcgacctttgagctgggtctcaccgaccgacagaggcgcgaaagagaaggtgttgtgttgccgtacttcgacgcacagcataacgatggcccaggcgaaggaggtcggattctttacgacatgggagaggaagacgatttcgatgaagaagaggatgagatttagacatcatcaaatacgatacatgttcaagcaattctctgtgttctagaatcggcggattgtaacccgcaatcaccgaggtattaactatgcgtacattcatacagcgaggcctatgagcatggccacggagagcaaggaatcagaagaatcgccagaaaagaaggatgcaaatgacaagcccgacgccagcgaaaggtccatactgtgagatggttagccaagatcgctcaggggaaatctgacgcaaagtatagacccacctgcttcagcaacaattcccagttgatgcgtacagccgcctttctgtattttttgctatcctcgcggagtcgccccgacagttcacccatccgctccaaactatcgcctcgatacaagaggtcctcgatgttctttgtcatcaccttggtgacatcacggagctcatcgttcagcttgtcaagattctgagacgcgcgactgtcttggtacaatttctttgtgcgctggataaaggtatcaaactcgacaaaggcatagggacggaggtttggtgagaggtactgtgaggaggtataggtagtcgtgaattcggaggccagatcagcgagataggtaaatgcgagtttgcgggggtaggacttgtcgcaaatgcatagaaagcatatatcgtcctgaattgtgtagctgaaaggcatgtgagagattgtccattggcaatgtttgttgattgctggctgcgacttactgtagactgtattggccagactcaatactggcttggggtgcggagttgcggttcaatcgccgaaatatcattttagcctgactcttaatctcagagagctccgattcagcctacggatattgtaagctccagatcagcttaaataatcgttgtcacgtacctgctcgtcgtcgaccgaggctgccagcataaggcctgtttcactttgacatcagcactacgcatcctcccaacctcgcagagagttcctcaccgtcgagccttgcaatctgcgttgacctcaccatcctgaaagcgttgctcttttgttctgaaggacagcgctttcccctttgttttgctgtgagaatggctccgaggaagagcgacgcaaaggcggtaggaaggtcccgtgcggcagaaccacggtgagcatttgcttatcactctcctttccactgacgtcttataataatgccatagtactgctagttctgccgatatagcagaacagttaggtctcgtcatgtcgaccccaacatctgaagcgggctcacaagctaggaccccaagaagacctgctgctagagggaaatggagcgaggagcagctattgacgagcgataagtccctgcttattgatatggatctagtggtatgagccaatcctttacaaatgcgataccagattatctaagctaacgataggctaaaaatttctagaaactgctggcgcgacctgaagcatggaattgccttgaggaaagtgaaaagcgcgaaatcctctctctacttcccccagatgttcatccggaggcagaagctatatcggatgaccctaacgcaaagatcaaacccattcccgactcttttctccgctattcaaacaactggcgcgacggcattcgacagttccagctcgatctccaacacggccgttacgacccccaatggctgcgggaggcgcaggaagccaaacaggagcgcgaagacggcgactttgacgacttcaaagagcgggaatatgaagagttctggggccagaagcaaaaagtcaactggtatgcgatggctggagaaagtgcgagtgtgaggttgggaactcttatagatgaaggtgttatacagccgggcgatatctggaaattctaccatattttcggtaggggctctggcagaattatcatcgaaaaggaagtcatggtatgtatagatctatccactccgtatactgctctgccatttactaactactacaggtccttgactgtgttgggccaagattgacttttgcgattccacccggtgaacgagtctttcttcgaagcaatttcgataaggcggggtcattttcgataccagagaagggaaaagaagatatgaaagtcgacatcgacacacagctacagccatcgcaggccactcacgcaacttccgatggcgaggagataaaggtcgacaccggtaaagcgccacatgaggtctttacatcctccactgagataaatagcgataccgataccgctaccggcacacagccagtcatttcaccttcaaataacgaagagagccaacaagataccccattcagcgttgttattttcagccctggtggtacgcgaaatcgaaaacccaagcgcacgattcctgagccagaacctcaacccccagtgaaaaagagaggacgaccacgtaaaacccagccaaagcaatccgaaccgccgtcccaaaaagtcgaggttccccaggaaatagaagtgtcccaacgcgatgagcagaataccacggattctttttctgtgatgagaatcttgactgcaaaaatcgcagaaaataacagagctgcagcagaatcctccccccaaaagccctcgtgggcagaatcccccttttcggtactttcttccacctctgagccctcagagctccttggaccacatttatctacacacattgaggcacccgctgaggctgagcgggatgaaattaataaacccccaaataccgaacaacagaaagatccagtcccaattccgcctccaactactgatagtgagccggacgagatcatcgttcccaatatcccctcgccaggagcactcgtcttgaagattctacaaatcgatggccgcaagccgaccagccgtacagggaatgcctggaagtcactccgctgctaccgaaacaaccaggacatgggaagcctctttgatgtgcgagaggcatggttccttcaacatggacaacctcggtagctaccttccacttctaaccttccacttctaacatggaaatatcgatacaccagactcgcttacattattacccttgatatcacccatggttgcgaggattaggatgaaaaatgttcggtacatgaccaagttaggtagcttacaatgaacaaatgaacctcaagatgtcggaatacaggaaggatactggtaattttcatacttgatacatatggatcatgtgatataaccaggtgtttgtcttgtttcgacttgtcgatggtcctttctaccaacctatgctttgcaggcaataccttgcaggggactatatgagagctggcaagtccatagtcacctgaaagataatccaagtattgagtaagccttgctgaacaagagaagaagaagtgtcaccctttcctaaagaattatttctgctaactaaacaggactctcaaaaaagattataattacacatgatgcttcacaaaatgaaaggcgccataatagccaacgccatccatgaatcccagctcgccgacaatgagccggcaataccggaggcagtttctggtgttgctgccgcgagagtcgcgttatctgtggatgattccgtcgccgatggggagtcggatgattgagacggttcagatgattcagacgcagtatttgatgcatctcctgggctagacgacgaagtcacaatattggtgcttgaggcagctgtaatggtcggctccgtgctggaaggctccgacgtgctgcttggctccgacgtgctacttgactccgatgtgctggaaggctccaagatacttgtagagatagaagtaatcgtaggctccgaagcactctcagtagtgggagcttccgcagtctcagttggaaacgtaagggaaggggggatcgtcatagttggaataggcgcgggaatgaaattggttgctcgttgacaaaagttgccgccaagtgtagggcagttatatccaatattacagcagcctccatcggcacaattgggaccgccattacagccagttgcgcacctaggtttgcctgatataaatgtgcaagcggagccagaagggcaacatcccccagtcccatctctgcacagtgtttctgttgcttcggggcatgtttgctcctgtcgaggaatgagagctccggtgacgatcgcggcagcttgtatcctccactcggcggcgttggcaaggtggcagcctagggctacggccaagatagtctgccaagcgtgcatggcgggaggattggggggtttgcttgagataaagaaactaggaactcaagactaacgtgggacttcgcgtcctaatgaaagcgtagaaggaggtagatttgatcctacccggatccgaggaaatcgaccccagtcttatactagtctattccgtgcccaaaatgtccctgaaaatgttatctgagtcgtactccgtatgcctccttcatgcttgtgggcaggagctcgtattcaaccccgctctctcgttacttgcaacccgatctcgtattcatatacggagtatgttaatctagcctatatttggcctacttcttcgtattccatgaggctcaagcggcctgtcacccggggaaccaaatgggggtggctgatttgggtatctctgcccatagccagcaagtctgggtttgtaacaggcgaactcaccagtccataattggaaggtgaaaaatggtggccaagagaaatcaatatacggagtgtgtggagtagagcaatgaatcacggatttagggaaactgtgcagagtatctggaaaatatatctgaaatgtatgatggagggtggctaatatatgtctccttatgaactatacctgactaggagtatcacctatttaggaaagagtgatttagccttggacgactcaaatttatctgccaagcccctagcaactcttcctacttttgcagaacccctcctcgctttgcttgactgaactatgggacggtatggtaggattggtgagcattgaacagcattggtcagagtcgactcttaattttagagtaatataagctggcagcgaaataactatcaaactcccgagctcattggttaaccgaaagagaaatataatattatccactaaggcccgtcatttgatccagatatagcgggcataggatctgagtccgtggtaacatcaacagcaaaactagcctgtataaagtcctctaactcttcactcacagtcttgagcttctccttgacactcgcaacaccttcttgtccaacaatatgccgcgaaggagggttttcatggccaccaattgatgtaatggcatatactgtttcagagaccagcacttcaagatgtgcggagcttaatggtgggtgcatggagacaacttctggagcggagaatgggccattttcaatggagctaactcgggcgttctcatcgtttgttggacttggtgtgactggactctcagatgagacagaagcaccgggaagttgggggacaaggtggtttaagattccacggaagagaggcgcttggttgctggcgggtgagtaggcggggaagattggagggacactggttactaggttggtgaggatgccaatttcgatgctgcattggaagatggtgagtttgatgttaaacggggcaatttcgtaagccagactctgtaaaatagattaggttctgcgctaaggaccactccagagatactcacatcacagaatccttcaagggcccaacccgctgcgcagtacattcctagtccgggtgtaccgatatgcgccgctgtatatcgttagaccaatattcaagcaagagacagtatatatttcttactgatccctgatattatcatcacatgcccagcgcgctctttcctcatatgggggagcgcagctttgatgatattgaggggaccgaaatagttaacctcgaattgatcgcgtacaagattcatggtttgagttgaagcagaaagttcctcaactgttccaatcagggcttggggtaggtcagtatactgtttgagggtatcttcagaaatgtagggtcaccttgacttgtacagcatagaagtatgtctactcttccaaatgtaatgactgcatctgccacgactgcctggcactctcccatcattctgtgccaaaagactgtcagcaattaagatcagaattcataatcgagatgtctgccttaatgatcgcaccggatatctagcggaactgtcttcatgcgctgtgcccagccatcgtgttgccccacctcatcgagaaaagcatcaaattcatcccggcgacgttcatcccgttccaaagctgtatgtgctaatccaagaaacgcatagtctccatgcgcgaggacctgccgcgcgactgagaggccaatgggtgaatcccccgcggtgatcagccatactcgaggctcattatgcgacgggaattgcacgcgggcatcaaaggggaggttattttccatgagggtcaacgccaacagtcgaacgcactatccatcacgcgattgcaatttcaaagctgcttaatagcaaagtataagaatggaagatgcccgaaggtcggaagacaaatgccaagaccgagcaagttcccgggcctcgatctaatcgcgtgctaatcgcccacgttagctggccttttggcttcttcttttcttttcctcatccatcatgtcggaacaaaggccacgcagacaggaggagtcatccggtgtatgtgtcgctgattcaatgttgttgtgttcaatttactgactccctttagtcgggcttcaagggggcccttcagggtcttggaatcttcttgttggtccaatttgccatcagccagtacatgggaaacaaggacaagacagactctcccagcttgaattctgatggcatccctgcatttgccgatcgccccgatcccagcgaagtcgccgaacacagtgctcttcctgagaccatcgccccaatctggccctcctccagcgctgtcgatctcagcatttatgtaaccccgtctatcattgtgcccaacttcaagtcaccggacagtattcttgtggtagacgagaagaacttcacaattggaaactacagtgacactcgcgaaatcgacaccaccatcaaggtcccaaagcaggtccagcagaatggaactctctgggctcacttctttttggctcgtaccggatacccgctagacccaaccgctaagaactacaacaccgctgatgcagttcacttcatccgacctctgaaccagtacctccccaagaagaaggtcaagaagctgaagaaccttctctcgggccccgaggatgatcatgaccaggaggaagataacaccccggatatttcaaccatgtcatactatcaccccaacttcaccctgtccctgatcccagactccggagttcagaagttggcccagatgaaccccgcagctcgccagtatgtgcagctcgagcggactggtgcccgcgatgctagtggaaagaatggatggtactaccctatcgctttcttcaacaccttctggcaactgaagacccatatgaccgagttgaactctaccgtcgagaccgtgccgttgcatattactctcaacaacatggcgaactggaagttcaacatcatcagcagtgttgatgaaggctcgaaacaaagttcccgccaggctgcttatggcaagcctgctcctggtggtggagatggaactgagtgggagatggtaaaggaggttctcttggatacgaacatttggctcctctgcaccacgggtgtggtcactatcttccatatgttgtttgagactttggccttcaagaacgatattgtaagtgatatctccctatcaaaacgtgtggtatgtagcgtcgctaacattgtcactttctaggcccactggcgtaagaagaaggacattgttggcacttcagttcgcacaatcttggcaaacgtcttcatgcaggctgtcatcttcctctacctcatggacaacagtgaaaacacctcttggatgatcatgggcagtcaaggatttggtatacttctggaattctggaagattaccaagaccgtcgacgttcgcttgcgcccaccgccagccagctcttggttgtcgttcttgccctatgtgattgtcttcgaggacaagcacaagcttagcgagaccgaggagaagactaaggagtacgatgaaattgcgttccagtacttgtatatcttggctgttcccctcctgctcgcatacgccgcgtacagcctagtctacaatacccacaagtcttggtactcttacgttatccagacactggtgggcagcgtctacgcctacggcttcctcatgatggtccccagtctctatatcaactaccggttgaagtctgttgcccacatgcccggcaaggccttgacctacaagttcctgaacaccttcatcgacgatctcttcgccttcaccgtcaagatgccctggctccatcgcctggctactctccgcgacgacgttattttcttcgtctggctctaccaaggctggaagtacaaggttgactacaagcgcgtcaacgaattcggccagggaggtgacagtgacgaggaggaggagcctactcctgctgttgagggtgacaagaaggaggagcctactgatgctgttgaaggtgacaagaaggaggaagtggctacccaatcctcttccaagacaacttctaagtcgtctactcgcaagaggaaatgaactgctcagatgcaggtcttttcggcccatagaccgatgaaccatggatcaacgcctttgcataattagtaaatcactcgatttcactacttttggcatgatgctggtgagcattggatcataattattacaatgtcgtagcaagcaatgtttaattccgatccttctaattgaggattcctctagaaaatcactatagagttccggtctttattcatccagcaccatagaagtacaagagaaaagaaactaacaattatgatatgatcaaataatagacgaaggtcgaagtcgttgttgataattacccgattaggcttagggcaattttcgcatctccgcgcccgcttgttcttctatgcaactgccgttggatacatctaaaacattcattgctttgattctattagtttcaagactattgccaggaattgcacacaaccaaccagattgttgtttttcgacgcgccccaattgaggacgaagcatcgcgcgactacgcgctaataccaccatcccaaagcaaagtacattctgtcattctcgacgacacaccaattgtggcaattttacaatagaattcatgtagatggatgtcgacataggtcagttctgtttgtatcctttcagttgaaccacgctaacaattatccaggaagcaaccggccaaacggcctactcgatgcggtcgagcacttggaagctggtatggacaaagcctcttgagacggaaaaacatgttactaatgcaatctggtagttgcatttgtgccccctaagcagagatacacagatgccagtctactagccaaaaccatcgcttcaagcgcgtatgagagcggcattccgcaacccgtgctggcccgtctcctgaagattctgaccacgaagaataacctagaccagggcactgctacaacgctgatcaaaaacctgtacccccaggagaggatcgcgtctaagaatgtcactcaagtggtctgctgccttgggcccagcaagaacaaaccgagcctcgccacacaggctttgctattgcgctggctaattcttgcgtatgaccttttcgaagataggacgcatctcgccaagctttatgctgtacttttcaattatttggacatgattagtttgcggaaaccgctgtgtcaccttctctcactcatcacaagacgaaagcacgtcaagccattccgcattcaagccttgatggagttgatacatactgctggtggtgaagataaagagcttatcagccttctgaggattttcaagaattattaccccgagatcattctcggtgagttcggaggatcgagaaggaatgccctcttcttcaaacacccagacccggagtggtcaagccatgtgaaggtgctgcaagatcagaatatggaaagagtgcaggccggccagggatcgagtttccaagttgttcatcgagggactgtgaaaagaagtaggattgaagtggtcattccgactctacaaacttcacgggtatctcataagcacacgtcgctggaggagcttcgtgatattggccattttgtcgacaagcttgacaagatcgaattaccaaatcagattatctcaactctgggggatgcaatggctcagaaatatcttcacctggtccaatccgaacttgcaaatcatcgtctaaatgagtggctgagaagtttcctggaggataagctggaattgctacgtgaggatgaggatgatgaacccgagacgttatcatatgtgttgggttttgttgtggggtatgcatcctatatcaaggtatggttttcagacagatcattgtcaattcagacattaaccaaatattaggacctcccatcctcgatacgttcattcttgaagtcttatctggaaacgtggaatggcaaggataatcgtgaccacgtcttccggcttctccagtacattcccattgaatctttcgcgtcgcttcgaagtgaattatggtcaccattggagtcagctgtgttggacgagagtcttcgttccagaacagcgttgttgggtttctattcagccttaatcaaccaatggggtgtgaaactccgatcacagtcagacaaaacagaagaatcggtgtatctcagtcaaatcatcgtacacgccgagctcctagcctcttcgattctggagttctcggtggaggatgaggataaaaagtccaagccagctacagtctctgtgctcgacttctacaaaaccctttcagaactcttttctcatgcaccacaagacgcccgattccgcatcacacttccgtacgcgcaaaccgtgtacacactcgccttcacgcctagcatcgccgtgctctcaaccctcaactccatattggccgtctacaaatctgcattcgaggcctctctgagttcacaagttctccaagcacaaaactccccggcttatggaacagatctcgttggtcggttcaacggatatgtcatggacatgtgcaatgtgctatggcgcaaccgtgcacttaacaccgaagacccgaatgcgctaggctgtctcgtcccagcaccgactaccactgcgttgacaaactatatcaagggcctgtccgaagcatccaaacactatgaccgcgaaagcgctttccacattaatcttacatctatattctctcttagtcaccacgctgcaatttgcaacctgtctgcagcttgctttgcggatctggaagaggaccagcaagttgcggatgaccgcccgaaattcagaaagccagtcacccagaaagcgctacaggcgctggagagggatggcggtgctaagattacatggcaggagtaccgtgtgcatatgctggactggttggatgcgattgggtgccggggtactggcgttctgatgagaagcacaatgaaggctttgcgcaaagagtaaactcatagtcggatgaaactgaacaccagttctagaaattaaatttctcatagcgccattgaaatgcttggtatcggtataatacatattgtacatgctcggctctcgatatgagacagacggcagcatagcggcgaagaggtcagaacttctctatcgagttcagatatatatcttgaacactgggatcttcccgcagagcactcaataggtcctcaagatctttcgcttgttcctcgtccttaaccacgaccatgctgtcccggttgggatcccagaatatctccaattcgtcaatgctgagacctgacaatttcgcgaatgtttcgcccacagtttttgtctctgacggatcggtcaagatcacgaggcgacccttatcatcggtggtgatgtccgccgctcctgcttcgatcgcctggtccaagtagtcgtctacattcgcaccaacgactacattcgcaccatctttcttctccataacaactctccctttcctctcaaagaggaatgtagtcggggtgacgattcctccattgtctttaatcatatagcgaatgtcctgtagcacgcgcgccttctgatccgtttgacactctacaaccgcagccactgaaccaggcagcatagcctcaattgtcagagattctagtgcttgacccgatacactgagtccttgtccgcgagcgattgctgcttcgataatgattttcgggatggaggctcgtttcgcattcgacaacgcgagggctagacgaggattgtacttcgtgtcgggtccccacactagaacatagtattaggatctgagatatgcaaaattgaacggccatacgtactctgtgtagcattggcaatttcctttcccactatttggcgttccctgctcttggccttgtcgtttctggccttgtcatgcttaatcgtagaccatttgttgtgaccggagaggatagccgatgtggtgctgaagtagcgacactcatgacaagcagagtcaacccagcgggattgttgcagcagcctgctaagtctgagagccataatggttttccttctccatatactgtgagttgtagagaagatcggatcgccattgagattccctcgggcggctgtttatccgatctccgcggacagtgaggccacacgataaggggagagacctggggttgacgcaactactatgaactagatatttccaccttttttccctttctttcttgcttatggagctacgcccgcactgaacctatctcatgtcttcctccgatacagccccagcaccctcccctccacaaaatggggtccctgagctcgatgtccctaaactacacgccctcccctctgaacaacaggaactgtacatgcttacgttcacctccgacctcgtgcaatacatatctgaattggaagccgcagaggttacattgcaacaaaaggatctcaaaaaggaattgttcaagatcttgaacctcccttcacccactatcactcgagtcctccgcaacaatctagggcgatgttttggcggaatactcagtaaaggggatcgcgggatcctcttcgaaacaatcacagacctgctggcaattgtgaatgctggcaagagtgaagccgaattaaagattaaatttgctgcggcgcattgtttaggagaggtctttgcgacagctggtgagagtgcgttcatgcagtccaatgttgcgatttcgggcgcactcaaactactgaaatcagcgaacaaccacaccggtcttagaggagttatctttgccgtgctgcgcaagattgtggttggaattggagttcccatcgatgaagcaaccgctcgcgacatctggaagcaggcccgcaacgctgctatcaacgacaagtcgactttcgtccaagtcaatgcgtgccgctgcctggagcagttggtcaccacgaccccattcttcgataacacacatgacttcgaccacctcaagacccttgtatggaaggttatcgacagccccgccgcgccagtgcggcacgccgtagctgcggttctcggtcgggcattaattaagctacatgctacggatgcgcacatcacagccgccccgaaaccgaaatcgaagaaatcgaagcgcatgtcgaagaaacctggcgcggggcttggagatgaggaggatgccgaggtgtcagagtcatcggtccctaagaaaaccgactcgcgcctgtacttccttcttccagacttgttgaggcagctttcatcccaatacctgaagagtaccacttcgaatcgctcacgcgcggggatttgtatgtgctacaaatatgttgtgcgcaatctgggagacaaggttgtcgaagagcgttatggtcagattgcgacgaacttgcttgtcgagttgttgaatcatccaacagtcacatacaatcgtttccgcctccttatgactaggaagtttatcaaaagtattcttgaagataccattggccaggaattgctgcgcgagaacagtcaactcaatgccgcaacatggctcaccaacgatatcctcaaggactacccccaggttattcaagaacgtcgcgaacccaccaagtacacactgacgagtgcggtcagcgctctgtcttcgttgatctcatcgcttggttccgccttcagcgttcaggctgatagctgccgagatgctctgcttcaagtccttcctcaccccagctacactgttcaagtccacgttgcgcattgcctgcgaaacttcgtcctagcctcccctcaccagctgttgtcatgtgtgacaatctgcatgaacagtttgaacagagaaatcggacagctaggcaccccgcgccaatcgcctcgccggtgtgttggatatgccaatggattatctgcaatgctaagtacttctcgtttgcaaccactttatggagcagtggatgtctttgcgcgcgtttttacccaggcaaccgatcttcttaagacaagcagcacctccgagcttcgggttgcgagcatccaaatccaggtagcgtggattctgattggaggtttgatgcctcttggaccaagcttcgtcaagactcatctgtctcaattgatgcttctctggaagaacgctctgcccaagcacctcggcaaggagaacgctgcgcagccaggtacagttgagaccagtttcctgactcatgtgcgagagtgtgcactaggctcgttgttggtgttcatggagttcaacagcaaattgatcacatcagatggtgcaaagagaattggtgcgatgttgcaacatacggtcgaatttttagacaacttgcctaagccaaaggctatggaagatctttcacaaagactgcacccatccctgcaattgcaagattattcaactatggtccgccgacgtgtcttgcagtgttttacgaagcttgtgcatgtccatccacctagccatggggatattatttctcaatccagtcttcttagcctggctatttcttcattcgcagacccagatgctcagtacaagcaactagaaagctctatttctggctccgccggacaattcgatggtttatgggatctatgtgataattatgggtttggtgtcactggactctgccgagaatatattcgtgctacactgtctggcactcaagaagacgacaagagtcccgcttggtgtgcacttgactctgtggaccaagttgtggacgacaccttaactttccctatttgtcaagcaagcgaacacgacgcggttcttctatacagtttgcgagatggagataagcttgctgttgatcccccgacaacaggagttgtcaactcggcaatcgatttgttttctgtggctcttgctcttcattcgtccaaaatccaggaaagcagtgtcgaacagatcgctacattcctcacttctcctggcctgcaaagaaaccccggcaggaaagccgcattggtcgtcaacatctcggtcgcccttttacatactctgaaagttgctgttaaggagacagacttcgtgcctggcaagctgaatccatctactgataaaattttgcaagagcttctccaaaggtttgtcatagatgctgatcctgttgttcgcacaattggcgttgaagcacttggacggctttgtgatagtgctggaaatgcgtgcaccaatacacaagttaattggcttgttgataccattgtcgagaacagagaacctaacgcaagagctggctgtgctgccgccttaggatgtatccacgcccagattggcggaatggcagctggtttgcacctcaaaacgattgttggtgttttaatgtctttgtgtaatgatcctcaccctgttgtccatttctgggctcttgggggcttggaaagagttgctaactccgctgggctgacattctcgccttttgtgtccggctctttggggatgcttgctcaactttacaacgctgatacccacaacgaggaggcagctgcgttggcgacctccaacatcgaaatgtcatttttgacaccggtcgtgatcagccgatgcgtggactctctcatcaatgttcttgggccggacctgcaagacattgcgaagacccgaaatctcattttaaccctgcttcgccaattccagttggaggaaaactcagcattggtgacggaaagttccagatgtttggaccatttctcaatgtatgcctccagttatgtcgacattgcggcatacgtgaagcgactgcaaaccgagcttcgagcaggcaacaccctcacgcgagatgtggcagttcgtggacttaacaacctcatgaaacgagacgcaccatctgtaatacagacagcgggccagtctttggaagatgacatttggcttgcatttgacgaatcgccgaacaaaaagtcactgaagtcaatgattcaggactggcttcagcagacggctttgacagaaaccgagatgtggatccaacgttgtcagaacatcatgaccaagacacgccacaaggcagaacttacgcctatcacagctgttcaaactacagctgccgataaccccgatgacgaggttgccgggtttgcatcggctgctggggaagggcaaggtgatgctgcgaacggaggcatctccagccaagaattattgaagtggcagacccgcaattttgccatgagctgtctctccgaacttctggctactgtccaggaggcaattcttccagactctgccatcccagcggagttggctctccagaaaaacgtcggagatattgtgagaatggccttttcggcgtctaccgccaatgtcattgagctgcgcgtatggggattaaagatcatagaccaggttcttaagatgttcggcaagacaccggatcctgactttgctgaagcctcgcttctcgaacaatatcaagcccagattgggtctgcacttactcctgcctttgctgccgattcctctgcagagctggcctcggaggctattaatgtgtctgcaactttcattgctacaggaatcgtaacaaatgtcgaccgcatggggagaattttgaggctcttggtgctgggcctggagaacttcgcgaagaatccagaaactactgaaatcggtgatcttaagggtctcaactcaaatgctcgagttatggtaaagctcgctttgttctcggcctgggcccggctccagatcgcaagcatcgaccatgagtacttgacccaggtggttcaaccttatattgcaaaactcacgcctttatggctttcttctcttcaagaatatgctcgattgcgctttgagccagacatttctggtagcttggggacaacgtcgagcggtgacctggatgaggtgtatgcggcgttgaaccgcgaaactttgttgaaggtaagccccgatgtagttgttgtaattcggcaaaagctaataatattatcagttctaccaagacacgtggctatacttggttgatgcgattgctgggctcgtcgagaaagatatcgactttgttttcgatgctttggatggcaaattacagctacccgaggagcctagcggcgttgagggcgaagaggaaaaagaaaaagctcccgagaaggaagaagggaaaggacatgatattaattatcgtgaagagccggtcgcattcttctttgtcttgtttggactggctttcgaatctttggttgatcagggaacttcggcatcgcaacgattggagattcttcaggcgctgaagcgaatcctgaggccggtcatctctggaaacgccatctaccaagatgcaattttcacagagaccatggacagctttggccgtcttgtgttgacagaagctacccccatccagactgtcattgtcgagattgcccaaaacctgtcactagaccaccccgcagcaaagggtgatctggaacgcagcgaccatctttccgatgacattgagcaactcttcgagctcacaagaagcatcattctagttctcgctggaatgcttcccaatctccgggaatcgacaccgctcgcgcggttcaacgtcagttcggatgagtctctgactcttattcgtttagcacttcgctctcttgtcgatgttgcatccgtattcccatccatcattcgcaacgatctccacgcttgtatcctgcatattttcacaactatcctcgcaactggagtttgccaagagtgcgtagttccccaagctcttcccatcttcaggcaattcgttcacggcattacccacacaacagaatcacccgaagaccttgaggtcgtgtcattccagctgcggggatgtctcacgcgcttcctgaccattctcactatcgctcagcgacgagaatcggatatctctattccctgcgccaagaacacgcttctcgccatcactttcctgctgagtgccggggcacacgttatccctccccaggagccagtcttgatccgagttctggatgagttgcttgactgtcttcaagacgttggccttgccaccgtggcagctagctgcatccgttcaattctcgttaaacccggctctcgttccattaccgacgaagtgatcagccgatacctcgtcccgcgactgattgccttcatggttgcctgccctctagacaatggtgatatgcctacggaccccgaaaactcccgcacggtagttgctcgcacgctcgtgtcgtgtatctccaacgccactttctccacttccgaactgcccgccgctacatccctaatcatgtcggcacttttggcacgcgccaagcgtgaaggcgagtccgtacaccaagaatccgcgagccatctccttgagcttgcgaaggccgaccagctcactttccggacgttggtggctaccatgaacacagaccagaagtcactgctagaggaggttcttcgaagtgccggagtcggagctgttgcttcgaagactggtgctgatgcggcagagaatgctccccaggctgtgcctagtatagcattgcgcatggacttttaggaacgttatacggaatcaagacaaacaaaacactttatgatatagttaattggcaaatatttcttatatgccctctcggaagacgaagccctccgaggctccgatcacttctcctccatttctcacttctcccctagcccagacgggcgtagtgtttcatcatcctgggaacccgatattcgagcaatttaaagcgtttgagggaatactcgcatctccactttaaatatctgtaaacttgatgagctcctgcttgcccctggatcataccccctagcccccacctctttcccttcgaacatccctcatgtcaggctccgatcacttctccccttgcccagacgggcgtagtgtttcatcatcctgggaacctgagatttaagcaatttaaagcgtttgagggtatactcgcatctccactttaaatctctgcaaacttgagagatcctgcttgcccctggaccataccccctagcccccacctctttcccctacttatcctcatctcaacagaaccaaggcctgccttcgcactcatgactactaggaggatacttcaaactacacgccatctaccgatctacagccaattcgcccgcccaagcgttacccgcccgaccttctttcgctttcccttcgaacctccctcacgtctcgcaaagtccttatctacatcacatttcaacacaatcaggagtctctcaacatccaccacaatggcctctcgctcaaagcgcgatcccacaatgtattcctttatgaatggggctgatctggtcgaggaacttcttaggtcgaggaacttcttaaggaggatggattcacaacatggggcttcgtgatctttcattgtacgtactataacgactctgactgggagaatttcatggctcgcatggtcggtactgtcttagaagatcttaaggaatatagtgaccttgaatctcttcgataaattcgccctaacgatactagaagaccactcctttaagtgtactacggttaccaccctacgtgagcacttctattagtagaagaagactgtattaaaagaggaacagggcgtaagcgaagactatactctaacgagtggccgataccacttctttatcactgtggactaggaggctatggagtccgttctaaacacccctatgggagggtttgaagaatataaattagggcatatctgtatggttaatgctaaatagaaatggacagatgcgcctgaagaggactctaaggacgaggatatatcagagcctaaggagtttaagccccttaaagggtatactgaggatgatatgggctggatgaatatacgctggcgtattgtgcagcttctgggattctataagatgactgagattgatgactagtaggcgtattatgtccggtatccggagatcgcagacataaattgatatctacccgtgctggaaacagaatttggtatctagcactattaaacagtttcttcaatcgcgtttgggttaaatgagctagtaacatgggcgccgcgctagagcgcggctcagaaggagcgtacggagagatcacgtgacctgaaacacccaacgactaacaattagttgcgtcccagtatagcttaaacaccattccaccatgaaaaaaccagatgacaatggagcgattggggttgccttcaagccataatttcacacaaatacaaaacacatcgcagtccagttccacaggctcagagaagaagtcgccaatggttcagtgaagtttgtgcgaatccaatcttatgtcacagtggagtaaacctataattttgccgttttgaccttgcaaagtcttcaaatatcgctagctaacatacttgaatgtattttctaatatttgtataccactctcgagcagcaatgtttgatttttgaagatggtgggcggtgtgaagccgcagaaagttatgtggtagaactgtatcaggtgaccttcccttcccgtctcagttgtagttcctcgtctacatagacttcaacttcagatcattatatgctggaattcctgttttttttttttttttttttttttttgagaataagtctctgcctgtgaggtagaaatgccgccggatcggggtcgtgcctctaaagcatgcacctcatgcagaaaacaaaagaccagatgctacgagcccggaattcctggacgggcatgtatgcgatgcgaccgacttcaccagagttgctcgctcgtccaaattattgcttctgacgaggaatccgtagcccccgcaccagacacagatgctcggtatcaatcccgcagctcatgtttagtctcaaactgacaagcttctatagtttggaacgtcttgaaaagactgtggctactctgctcgatcggcttggagaaggcccagcaggtactccaggtcatgagtcgagtagacctacccccgtgcggacgagcccgggacctggcgatgcgtacaaggacgcggaatcctccgcggctccgatcatggtcatccgcgatctagcaacggacagcggcatcaaaccaatgtccgatgccagatccctcggggctgtattggacgagcttatttcgcatgatcttgcacttacgcttataacaatgtatgctgcatgaattacttcatcatggcgaattgtcactaaccttttattagtttcctcgatcattacggtcgatgggttctctttgatccgcagtgcgagccaagcgagcttctccgccgagtgaaaaaatcgagcttgctattcagcgcttgttctctgatcgccgtgcggcacacttccgaggaattggctgcaaacttagctccgaagttgtatgaatatgtccggtcccttgcttccaccacccttctagtttccccacagcctatagagttctttcaggccaccctaatcttatctttgtggtcgacaacggtcggacaggtgcctttgagtattgatagctggcttttgagcggtttcgctttacagcactcccattccagcccgctgtttactgctgtcacgactcagtctcatcccccaaacatattggatgaggaaactatggctaattgctatctctggaatcatctctgtcttgctcacatgcattattgtgtcggaaccagccgtcgatccatgctacaaccctggcaaatcgagcgatgtcgtgccatcattgtttcggatcatgcgacaaattttgaagtgcgcatggtggccgagatttatctttactggactgtatatgaacatctcattcaggagtcggttgatttactgaaatcactggcagctttgcaggactggcgacgaaaatgggaatttgtccttggtatgttaatttgacttatatgtttgcgttttcgctaatgggttttgcgatcagagcaaccaaggtctcagtttctctcaatgggctttcacttctctcatctgcttctatatgaacatgctctgaaatccaagtcttcccgaggccgagaaccagttgtgtcagaaatgattcgccattccacggcaatcgtgcaactggccatggatacagtagatgagcgcacgcgccatttgaccgaccacatataccacatgatcacctttgcggcgattgttatctgccgcctactgaatgcctaccaagaacaggttgcctcgactcacaacatcgaggaactcgaatttctcatacgtgacttagtgcagtggatgtactgcattgggttaccatgccatgcggcgcatactttaggaaatatcatcacgaaagtgcaacaaaagctccgaccgcatgtcgagctaccaccagcaaatctgcaaccagacgagctacttggcgaacttaacaattattatttccccgagtttcttggattggggatttcagctaatggggattgggatcttttgtccaatatgggtctctttccggaaagcccatctattccagggagacctgactgagatatcaagccgtttaatatgcgagttagaaaccatataatgcggtaacatagtgacagctcttcaccgacccccataatgcctttcaatccaccggaacagagggaatacagccccagagaatgcaaaggtcaactcgtggcctatatttgcacctttcttgccaatcaaagaagcaataggacccgaataccatgcggttttcatgccaagagcagcaccgaggaacccgaatccgaaagccccgatggcggcccatccgaatggcaaatcagcaatgctgttccaagcatcgaaatcatatccattccatccattccatccatgccggaaaatgaaatgctcttccattaccagagtgatgtggatcacagtccagtacccaatcacactaagcaatgtctgcagagtatccgagaaatacctggctgcacaacaaccaacgactatcgctgcgatgaatccaagagtgaccataatcacacgaggaatgcgcatagcccacggtcctagattctgtgcgtgtagtgcaaaggagtagttgttggggatgttattcttttccaaaaattagcatgcaaatcagaacaccaactggatccataaactcactggaattgagctcaatgccgcaagcaccatcaagaacttcccaaatccccctgccggctccagtgccatcttgagcaaccccccaatcgaagaagccgtatacgcctctttccacgctgtattggttatagtgcctgtatacaaggccgcaccaagagtctgaacaagcacagtaggaacaaagatacccacataggtagcactgaagatctgccagcgcggtgtatccttgggcatgcgcacattataatccgccgcgcaattcacccaggaaaccgagaaggagaatatcaaagccatgtatgtaagaatagcagcagctttgtttgagccctgaagatgaacatggtcctcgctcgtgagctgtgaagcacccgtcccagcagcaacacaccacacaattaaaggtgggatccagatgaatgtgtcaagacgatggatccagttgataccgagtacgcagatgacccagacagccacgcagatcacgatcacgccggcccaaatgggaaaccggccatctgagacggcatgcaggacagctgcgccggagatagagttgattgcgttccaacctgttgtggcgatcatggagaatatgacgacgagcatgttgccccagtagccgaatgagtatcgtctaggattcgggtgtcagttacagagggctacctataggaatacattactcacgagaacgtcgtcatgcgtagtcctgttagtccaaatacggatgtccaggctggtagtaaatcgcttgtgatgttgactaggagaatgacgatgaagcagtcccagaagggaaggccgagagaacctcccaaggagccgatgttgagggtggctacagccatgtttgcactgaacctgttgatagaaaagggatactttagtggtgatcgatattcattcggatatctgtcttaccagaatgtagcagcatgccagaacttggttgtattctgttgtcgctcttcgtcggtgacacgttcgatgccaccttcttcgatggagaatcttccatgaaagaatgattgatgaggcctcactggctctgcttcagactgtgctttctgtatagattcattatagctgttcattttgacgaatggtcgagataaaaagctgaagtgaactgagcaaattgcgactttatgccggggagacactctcctttctatatttccacaatatctccttttttctactcatcttctttccattgatagcacatcagacactgaggtctgcctattagcatccatgattgggcttatctcgcgccatatcgaacacatctcggctannnnnnnnnnnnnnnnnnnnnnnnnnnnnnnnnnnnnnnnnnnnnnnnnnnnnnnnnnnnnnnnnnnnnnnnnnnnnnnnnnnnnnnnnnnnnnnnnnnnnnnnnnnnnnnnnnnnnnnnnnnnnnnnnnnnnnnnnnnnnnnnnnnnnnnnnnnnnnnnnnnnnnnnnnnggctaatccttaccgcccgcggcatcccgcggcatgccggaccgggatgccctaaagaacatggagtataatccacttccctcgatttcgccaaacataaagtcccctacatctgcattacagctcttttcgtcagatcaacttcttcaatcaattgacctgtctacaatggagcagcacacattccgccgccgaggcctcggtctccgcggagtcgacgccgagcgcgtctcgccaggctacgttctatacgcacctctcacctcaaacacagcccacctagtctccacaacaggcaaagaagtgcaccgctggacgctcccccaccgcagcggccgccacgcccgcatcctcgcagacggcaacctcgcctacaacggcgcgcacccagacgcacccaacctctttccaatgtgggcgaagtaccgaggcggcgtaatgatgcaagtgagcccagacggcgaaatcctacggcaatacagcgacccgctggcacaccacgaccagaaccacctcgacgacgggacaatcctgtacacaacccttgagccactcagcagcgccgaagcagcgcgcgtgcaaggcgggatcccagcaaccgaagccccaaacggcatcatctacggtgactgcatcaaactcgtccagccgtggtcaacaagcaacacctcctcctctgcggacttcgacggcagtggcggtaaaacaggtgccaagctgctctggtcgtggcgcgcgattgaccatctcgaccctgctgtctttgctgcccatccgcactatacgcgtgaccactggccgctcatcaatagtgttgcgtttgactcaaatggggatatcattgcttcgtcgcgcaatgcgtcgagcgtgtttgttattagtcgggctacgggtgcggtcaagtggcatcttgctgcgccggttgtcagccagcagcattgcgctcatgagattaacgaggcgggagacatgttgattcttgataatggtgtcttcaggcctgggatttcggtgccgttttcgagggcgattgttgtttctaaggagggggttgtgaagtgggagtataaggatttttcaaccggagggctgggattcttcacgccgtttatggggtctgcgcagaagttgatcggcgggaatgttctgatttgtgaggctgctagtgggcgggttatggaggttactgaagggggtgaggttgtttgggagttcgtcgtgccccagctggggaactataagcaggttatgaagaaagaggagttggaggagatggaggcgattgggtttgattatcttagcaatgcgattttcagggcttataagtatcgtcctgaggaggtgccttgggctaaggaatagcggagattccagggggctgagatttgatatgcgaaatcagatgtgactttctgattgagtctgttgtacatagcagggtaggtggttttttcatgttctataaaaaatatatatatcggcttttgtctaactggtggtgatacaaggtgtgtacagagagagtctgatcaagtggatggatacatgagaactgagacaaaatgaaatagaagaatatgtggctgagggctataagacaatgggaatgaaaagtgtaaactggataacgaaagtaggcgtatcaggcgaggatttacgttcaaggtttcaaccaagtgattcgccgagatgggcttcagcagacggaaagactgtctgaatgccaccatcttggacggctcgaacttcagtagcgatttctttgctggcagcgggcttctccgcttgcttggcttgcttgggctcaggcaccttgtgcacggaagcatacttcaagaagacgatgatcatgacttataatcgagttagctatacgaaagagccaactaggaacaatggggcacttacaagcacagatggcaatcgtcgaagcagcgcgtctagtcaaaatccatcgcagaccttcaatctcactctttccatcgctgttaagcgacacggtgatcttgtagttcaattcctgaaccgaggtgtcgatggtccgctgcggttctcgcgtggacatcttgtggtcattgaacatgcccttgatgtcgtctttcatgcctgaaagttcctggctgagacgctgcgagataatatccgtttcatgctgcaattgcgtgcgcgaggagcgctgatgctgtatttccgagttgcgagctgtctggagcgatgactgaagctcggagcaggctgctttgaacaggtattcttcattttcgacatcagatttcgaagtaaggctcgccctagccaaagagaggttgttctgcaggatagcccgcacagccttcatgattgtagtagactgttcttcgctgtagccacctttggacagatcctgtaccaatgaatatgtgtcgaaagggtgaacatacggtgctgcagacaaatgcggcgggcgatcgtcggacgaggagggttccccggttggggttagaaacaccgacggcgagggcatgtggaggacatcctcaaacggagtttggtttgtggatgaagaggtatctgtactttcttccgatggggcttcggaagcgggggacgaagaggccgaagcctgttcctgttcggcgccgtctatatctttggcctgctcctcgtgcggttcccggtccgtcggagggttgtcttccttgtcttcctttgtttcagcttcggttggttggtctgcgttccgttggtctgcggtcggggtttccgaagaagtgacatctgcattgttttgctcggcttcctggggcggcggttccgactgtgactcgtccggtggagcttgcccctggtcggaggcatttacaccatcatgtccagctgatggatcgcccggcacctcctgatcgtgtggacccttcttcggacgcaacgaatgagcagtattcggttcgacggcaggaccatatcgccgctggtaggaagcacgctcctgttgctgactcgtatggaagcgttggttaagccggtatggaattctaattgaacggtatgttctcggttcgcatgatcgcaccgcgcgcataaaattcggatacaggaacgggagcctgggtgtggccatggtggtaaccagcatatgaagaagctaaagtcttttccgcggggaataatcaacgtcactccgtctccgggcggtgatgtatggttagtcagctatacccgtccgcgggtcgggagcttccttagctgagctatccgacctcggaaggatctgattggttgccggtacctgctgtggttactattaatatgtacggagtacagcttgcctatatataggttcctacaactattctagcgaaaggaacaggcctgataaaacgtgtatagcctgccggggataaatttcgacggactagcccttttgcaatcatcttatcccaacgccaaagccaataaatgagggtatgtagtaggataatggtctgggttttcttatactcagtatatgacgagaatagtagcagtgtgttctactatcattacttgacagtctacatagatataatttaaaggatgtaactagatattgggactggtggccgattttgggcattccagagagagatctactcggtcctattacgatccgcatgattgtctatcatcaatacgactaggtacgcagacatagccctggtccaaccgaccacttacatgcaaccgctaacctaattaggcatctggatctagataatataaaaaaagagtatgcatatatgtgtaaaagcgcaactaggtatatatatgtatagtcattgtcggcagatagagtacaattcttcttgcagagatctctgtgaaacccttttgtttgctgcatatgagcagccgtttgttgtagcatctatgaaggctacccactcagccgcatcggaatactgcagctttcttctctctactatctctgatttgatcaaatttcagacccagcatggccgaccttattccaatcatttcacaaatagcttattgaccatctgacagaccataataaagatccatagtatctctatctaggagaagaatatacgagtaattgaatagagggagtaatatgaagtttggacctcacgtcaacagacttagacatcagacagctctgtaaagtcatatgtctgtttgcaatacaaggatgttgccctttatgtttccatttatggatgtttgtgtttgtttgggacaaacaacgtttagggaaagagcgactaatgaagaggcatctccaattcgggaaggcacgcgtctggtcatttgacccccaatctctcctcttccacttctctctctcctctatcgacttgtttacctcttcggtccacctcgatcttggtcccttcaagctatcaattgagacggagacgaacccattgtcttgtcttggcctggctttctaaaccataccatttcctgtcctaatataaatcacattaaaatcccccaaaaaaagaaacatccttcgccaggcgtcaggcgcgtctattaatccccatctgtgtcgaccaacttctcggcccataaacaacaagcattgagccttatcacaccacaatggcgtctgtacagactccgtggacctcaattctgcttcaggaaaagcctggtctacatgaatacaatcatgccctgtcgaatgtcgaaaaatactacactcgcttgcagcgagctatgcaagatgaatccatccatgatcaactagttctcaaccccgaccaaacacactcacgtctgctgaaatcctttgaaatcttgcgaaccaagcaactgcccggccctgtcgccgaagagatcttcaagaccatggtacttccattcattcacgacaacatcttctcgccgccgcagatgattcaactcgttggatctgcactacctcttataacaaaacaacattctcaattcctgcgagacctcgcaagcactctcctctcttcacaaggcttgttcgatcacctggtggccaacgaaaattacacagtgattctgaaggaatggctgttctcgaaaagaacccgtctttcccttgctctctctacgcaggttggagacaggttggttgcaatgtgcaatgcctgttccgctgatcatggaacggaggctactgtagagagttgggggattgctcaagaactgatggaatccatcaatgcgctcattgactcgtcttacgaagaagaactgaaacgggcaaaagtggaaaatctacctcctctggaatcaatgaaagttctcagtcgggacgataaaaagtcaaccctagttcaacaaggccccaagaaggaattgaaaaaggaattcacggtctcggacgaaatcctgcagcagatggaccacttcaacatcctaccaccattgtccgctcgaggcctcacccatgcagtggaacatcttcaaaatgagattatcccagcactgatgcgctctgccttggaaagcttcccatgcagaatctgtttggataggctcactaccgggagccttacaggtactctagccaattcgacagacctgccttcagatcgaactacagcaccgggcaatgcccaagatattttcggcaagagagtcggcctttggaaggttttgctgtccgacatcgctttcaagaatataaagaaattggttcacggaggtaagtttgatttctttcagtatgtgcaacttgatcgtttctaaccgcatctaggcgaatttggcggggtggaacaaaagctcagagatttggcaagcggcgaatggaaaggcaaagatctatctcatcgtgtgggatctaaacagcagaagaaaagaatgcaagttcctattttggaagtaagcgcttctgcaactgtgtcaatgttgtggcaggttgatgttggtttttacgatgagcttccatgggtacagcagcagattgtcaaaggtaaataactacctcatcgagacttccggatatatgctaactttggcagtgtggcaaattgtgacctcggaagaggaggtatgttctaaacccaagcatcatgagaagtctgctaattaggtttcacagttggaaactgccattgagcatatacttttgatccaggaaacctacacctctgaacttgttaaactctgtttagaacgtcctattcaacaatctgatggaacttggacgccacagcggttcggaaacgtgaaagagactgggtcttatcggatgaaatccattgcttcttccaaggcaagcccagctttgattgagatgtcaagtatggggttacccccgtcagtcccattgaaagctggattgtaggctaaccatgagtttccaagacaaattttacaatctcactgagccgtttttgaagtcgatcgttgatgagaatgacacagaggagtttccgttcgatctctcacccgaagaattagaaattgtgaaacacttcagcacatcaaccttgattctaggacgaagtggtacaggaaaaaccacctgtctgctgttcaagatgcttgccaagcataaagcaagacagtcagcgtcggatgggcagcaagcccgacaggtatgtctttgtctcctcacaatgtcagatgagaaactaacatgaatagcttctcttgactcgctcctcttatttggcttcaaagcttcaaacatatgccaaaagtctgatagacgctcaatccaaggctccatcgactgaagaggatgtagactcagatctaagaccgacctccttcttcgccctgaagaattggcactttccagttgtctgcacttacgacgagtttcttgggcttctagaaaacacaatcaggtttgaacatctaatgccaaacttttcaacattttcccactaactgaagtagaatggcggatcgaaaagacttcttaagagacatcaaccccaataagacaaagggcctagaagtacaagggggagacaagccacgaattattgacttcagtattttcaaaacagaatattggggctctcttagtggattagccccaccatcttgctctccagagcttctcttcgcagagatcatgggcgttattaaaggctccaccgtcacggcaaaaagcctaaagccgttatatcgtgcggaatatgtcaagaagaatgccaaagcttctcccgcttttacctctgaggcagagcgtgagaaggtatttggagcttttgagcgctatgaaaagcaaaaaaagcttcgcaaggagattgacgagttggaccgtgtcggtaccttactgaagtctctgagagataacaaagctctagcagagcagatccaacgctgcttcgaggagatttatgttgatggtgagtctagttctcaacattcgagagcaaagtactaactatgtgtttaagaaattcaagacttacgttgtctggacattgtcttacttttgggttgccttagtgacgcccgtgggattcaccttggtaaggtctcctgaaattcatttacgagcttaatcgactaatataacatagctggtgataccgcccagtgcatctcaaaggactcggttttccggtttcctgagataaaggcttttttctatgaacattacgagatcattgccaacgaactaaatcagccctcatttgccaagcccgttcaattctctctggctaaaaactatcgctcgcatcagggcattctgagttttgcatcatgggtgatgcagctactctggcatggtatgaaagactgcaatgatcagacttgtttctatctaacggtttatgtataggattcccggaaacaattgacaaacttgacccagagattggctacattggcggaccgaagccaattatctttggtatgtcgtatcgcatcgcttcattggcactcaatcactaacaattgtcgcatagcgggatttgactcctccattctttctgccaaaatgattggtctggtcaagcttaatgacaaggtcgccgacttcggcgccgagcaagtcatccttgtccgagacgatgcatcaaaggacaaattacaaacccaaattggcgagattgcccttgttttgacaatcctagaaagcaagggtatggagtttgatgatgttttggtgtatgacttcttcggcagcagtggacttggcagtagctaccggtgcctttacatgcttgtccaagcatcacgagcgcagtttgattctcaaaaacatgcggtgggtatattccatgagataatcagcccgttatgattgctaacattttcaaccaggctttgtgctccgaacttaaggtatatctatctctttgctaacaatagttcttgctaacaatattaaccagtcgctttatgttgctgtcactcgagccagaaagcaactttggttcatggaaacccaagagaacagcgttgatcctattgtgcaaacactctcacagagcaacagcctcaagctcgctgaaattgtgaagcagaaagaccccaatgtaagtgatattctaattaaaatggcttgcatactaatctctttcaggttgcggaaaaggtcatggttctgcgagccggtggctcagtggacccagagaggtggcttaagagagcagcacattttctccatcagaagagctttgcagaggtaatatactgctcactggctagaggagagcttcatgctaataaaagttgaacaggcattgttcagctacaagaaagccaataattctcgaggaataacacactcgcaggcctgtttgtatgagcaagaaggaagatcccaccgagcagcgggagataccgaagaatttaccgtatgctatgagaaagcaatcgctcttttccttgaggttggtcttattacagaagcggcgatgtgctacgagggacttggacagttcggcaaagttgcaggtttgtttttcaatcgtcaggtctgagaaatactaaccccctttctagaaatctggaaggagcgtgaacaatatcaaaaggctgcatctttctatgagaaaggcaattttttcaccgaagcttcggagtgttatcatgcttgtggccagtacgaggcggcaatcgaggtcttgcgccgcggagaccaatttgatgaactcgtcgcctatgccaacaggtttttacaccgaattctctctgcaatgattacacaatattaactctatatagaaaccgcgagtatcttagcgagcctacattggttcgttattcgagactttgcaatatcttgctgaagcagggacgtgtctctgccagtctgagggcaataaccatcaatatgcttggatcagatgtgtccaaaattgcctttttcaaagagtttgaaatgtggaaccaactgtgtacactctattcatcaaagtccagatggtttgagtattatgatctatcagtggctgttggtgacattcctgcggcgataagcacattactggttcacaaattgataccagtagtcgacaagccagttgttgaaaagctgtttagctattccatggttgaagtcttgtacgcccacagggacttaattccgagcaagcctgagcgagatgggctgctgaaatcagcaaagtcaacttatctcgaaaagcttggggcacagtggaaatcgctattgctgttggtcgacgattttgaggatgtggatttacccgcgtcagttaaaaccctagataagggtcttgtgaaggatatcttctgtctttttgtttgttttcaaccgagccatcatctgtgggtagtgcactaattattttcaggtgattgctttcgagccgtcaatattcaccaagcaaaagaccgaacatcttccgatggagattgtcatccgggttggaaaactgctgcaagaccttcatgctcagaaccagtactccattaagtgcctggctatggcttgtggtatttttaccaatccaaaacaagagagccatacgatcttgctccactggtctccattgaggacttacacagcaacgcctcttgatggttcttcattccagaacttgattgacattgcaaaaaacttcattcaagagaagtttaccgcagcacttgctcagttccatgaaaatgcactcagtctcacgaagagggattttctgccgacatgtgtccatcatctctacaaaggtaagctatatccgttgacgctctcttagggaaatatctaacgagttgaatcaggattctgtccaaagtttaagaccaatgaatgctcctggaagcatgagaagcccactgcagaattcgccattgctaagttgaatgtaagtaaaacaccaagaattaataattgaccaactaacacctagttaactcccgcagtgtcttctcgctattgctgaggtttttgcgcgcctcacgcctgtttattaccaaagagtcatgggcaaggctttcaacaaaccatttttgggtcgtagtaagtggtcggtccaatctcgctgtacgtttcagatctgacatactatagggagaatctggattcaacagatccaagaggagcttgtgattgtcagttcactggagcaatcttctattgcaattacaaatctgcgtttcaacttgcagagcaacccagagtttgctgcgaccgcatactgcctagaagacttgctgttctatcgcatgaacactgaatggggctcgatgaacagtctgagctcttctctagagaaggtccaagaagctcaaattctcggtatggtgaacttcttgttctgaaacatcataaatcggctctaataaccaatttaaacctgcaggccctcacccagccacgcgttttcagcgagcacttattctgaatatggatcgcatcatgccaccacgccctagacgatccggccacccgctcgcgttacctttgacaacgttgaatgctgctgagagaattcggtcagcggttggaagacgccacggtcaagattttgtgagagatgagtctacattacgtatcggactacactaacctttgtatagcacaacggcatcaacacctttatccaatgcctcgagaagacacctaaatcttcccttggctcgctccatgctgttctgtctgtgttcgagtttgcagctacgtatattgtgtgtttccaagtctcgttgatggtataacaggttactaacattgcacagctttacatcgccaatccagggaagggtatcgtgattccttggtcctgggctttgcagcatctttcaacaattatgcaatctcccgttaaagactatctgttcaaggacagagagatccgagtgcacataaccgacttgatgcaccttgtcatcagcttctgcaaccttatggagcaagtcgaaaatgccttcaccagcggtgctctgaagttccaaggactgggccgcaccagcctcccaatccctattgtcaaacggcgctgcaccgagcttttgaccaccgtgaatctcaacctaaatcactggcccaaacagccaattggctttaaggatatggagaaggtggtcaacaaggtatgtgtctttgcttatgacaatgtccctaaaacaagcttgactaaaacaaactagacacttcgatcaacccttattcctccgggaatggcgctagaattttctaacagtgataaattccggcaaagttgcatccgcgagtttgcagcctacaaccgcaaagatgagctgtgtgtcattgcgcttgacgatagaaagtccgctcctctcttcttgcgatctttcacacaaggaaacgtgaaatttatccagctcagtgatatcttgaaaatatcgcgcattaccgagaaccaattatccatgggtctggaagaagactggcaagttgacgaatataccggctacgagctcgatatgatcacgaaccttcagcgacgttggcgacaagtgatggaggtcatcgagaacaaccgccatagggcacaatctcgcgagggcaaacttatccagcacttccatgaggtgtgcacgagacggatgagcgttctacctgcggccgcttggtcaacccgagataaaatacacatgcgcaaggtcatattcaccgaaggcataaagatcgccatgtctcttgatggtgttttggacagtttccgacaactgaatgaccggtggaggcaacaattccacagcaatttgtccaccgcaaagctagaggagctctccgttattcgcggacgtgttctgccaatcgatgggcaacttgagtacatcgttgagcactggtctcttaagggcattgaggaaggtatgatgaccgttccggcggaggacctcggtgtctcagcccgtgaggcccagcgcgctctctgggctgttcagcgcgagattgaaatcattaaatctcaagttgagatcattgcgaagagccctgaccggtaagggggtttcttcccttccatgattgttcagcagaggctcgataaccgaaatcggcaaaaaaaattgaaaacgaaaaccgtcagcaaaaaaaaagctagttagccggggagatctgtgtggaacgaggagaatttcttaatatctggctccaaccatcttatggctggacgagacacgagacacgattgtatgaagtgaaatgtatgatatcttgtttgattactctgtaatggattttgtctgcgtactatgtaatcggtgtactttctaacagaaaagttacattcaagtacagtatatatcctttgcttgttgtattatataatgtaaagcatagacgggcatttggcaaaatacagcatccttctagataaccactcactgtcttgccaagaggccaaacagcagctccgtccgagtccaatactcagccgcaagcttcttgatagtcttaacagtctccgcactagaaccagcgctcttctgagcacgctcgacgacaccagccagctgatttcgctcgccgagcatctgagacagatacagagcgtcgaagaagagctgcaccctccagtcgcgcaggcccgcgacttgatctggatctgggctttggatctctgatttctccgccgatttatcttccttctgcttatcttcattggcagtggggtggacgtccttggtctcagccttgctaggggtattttcgctgtcgagatcatccaaggcagatgcgatagccgcctcgagtttcgttttcaattcttgcttcaacgcctgcacggtggacggatcccataggtctaatccgcacgtatccatcgaggaagtgagacggcgcaggagcttgaagctcgaaaccgagggctgaacaggtatggcaggctcgccttcccagagtgatcggccaggcacggtcttgatcttgcctgtctgggggtttgactttggggatgggatcaagctcagcgagccggccttgctgactacttcggttgcaagcagcttctgtaggtcagggacgatttcgctcgagaagacaaagtctccagatacaaagccagcggggatatctcgccggacgagtcgtataagccttagtaggaaggtggctttttcgctggaatacgaggagttgaatgacttgaaagcgctgctgaatgatgtttggagactgctgaatgcgtcccgaacggcagaatgcagagaatcggataggtgtagggggtcatcttcgttgagtcggggtgttatgtcgatatcttcatcttccacttcacctccaacgagaatgtcagtccatcgtatacggcgtagagagtcgatagattcgttgactgcttcgattgatgctagccatgcttgatacttcataaggacggtagagacgtcttcgtcacggcccaataatctgtctactacggttcgtttgaatgcctgtgcgccgttcgtgtattctgcggtaatgagatcggaatcccacagagatccaacggagttgtgttcggtattctcccattctgatatcatgtatgaaacttgagcaccgacttcgcctaggctttgtgcttgcgtattcaggattctggcaagctggttattgaagacatttcgaagactttcgaggacattcacagagccgtgaatgatcgttgagccccaggacgatagccacagttccacagtctctgtgcggagcgagagaagctcagagaaatcggtgctgtggaccaagctcttttggcagccgtcggagaatttattgaaagcttggagtgaccattccttgattgattccacaccctgggttctgcttagttcgctgagcttgatccagggggtgaaattcttcacatctggagctacccagcggccaagaacttcgacctcgaggccatctagactctgaatctctgggtcggagaggaggggcctagctttaagtttcatgagcacatccgagaatcgatgcgatcgcaagacctttgaagcctgaagtgttcggacgaacagctggagggctctagggatgttctcacgagatacatccaactggttaacaatgatgcccaggcgcactcggtgaaagcgatggatcgcatcatcggaagaagggctctctacaaggcaataggcggccaatgattcaatgatagtgtcttccgtagcgcttgtagaggcaaggcgtttatcaatccgtttgataagtgtctgccggagggacgctagctggttccagagatcatcgaggaatggagggactgattcatgttttgataatgtcttgtgcagtaaccgcgagacaactagaatcttcgcaatcagcaggagcgagccgcgacgtcgcaaaagccggctgatagaggttgtacagcggtggaggagagaaagctgcgctccgaatgcgtgcttctctgcgtctatatccacattatcagctactagttcctgatttccgccagaactaggttcgtacctttctcatcatcgccagtttctatttgccggacatgaacatgcttcctttctataagccgggggttgcaccggcgtccaacatcggccagaatggattccacgccttgaatgtctcggttcatagccacaatcgtctcagccgtgccaactaagtcacgatatcgtgtcctataatcggataatatacacattagcgaagaaacagcccctatggcaaatcaatcacataccccacgagagctcggagcttctccttattgctcgcgatgtcccgacgcagctcctgttccacgcggcggacagtgggaatggggtattggaacgcatcgtgccatgatttcaagcttgaaggatcaggcgcctcaggggccatgctggcgggatatgtggtgagaccgttggttcatagagaacaagtaatccatgcgacaacggatgcctgacagccttagactcctggctagctcggtcttatcgttatcggcacgtgatggcagaaaaagtcccccgccaccgaggggaaatccgtcatcgttggacggaccgttttataccttacacaacttatattcaatatgccgttgatcgaatcagacgctgctgtggcagagacatcatccaccgatctccctgatcgcctccctttccctcccacgacatactcccatatcttgcattgctcttatcatgactggcatccgcggtaagcttccatatgactcaacaccaaacatatctgaccgaagtcctaggtaccgcacacttgccccaaagtcgcgcgtcattcctttgactgctccttttgttgaatacctccgcgccgacggcattgttcttccgcccgaggccgttgccccaaccgacgatgataacctggacacattctccgattcgggcgaggaggagcacgatccatctacagcatggcaagagattcacactaggatcaaggataccatctctgaactcggtggcatcgtcactccgaaattaaactggagtgctcccaaagatgcaacattcatggccgccacaaacgacacccaatgccgttctccgaatgacatctacctcctcttgaaaagcagtgacttcatcacccatgatttggatcatccctttgacgactgcgtgccggatacaaccagcgacgaaccgacgccatccaccgttgactcaccgctgccggatgtgccgtattctctggtactccgtaaatatgtcaacttcaacccttcgctcgagttccgttgttttgtgcgcaaccgtgtcctgctgtgcataacccagcgcgatcagaaccacttcgacttcctcttccccatgcgtgatatgctccggtctcggatccagtcattcttcgatgacaagctcaaagacacattccccgaatccaactttgttttcgacgtgtatatccccgctccgcaccagcgcgtctggttgattgatatcaacccgtgggcgcagcgtaccgaccctttgctgtacagttggttggagattctccggatgaaggatccgattggtgtgcaggaggaagaagacgatggagcggaagagtatgtgagaatctcactttctgatggtaagatcatctctaccggtacggcggaggagctcgaaagagaagattattcgggttcttccgcctcggaagatgagcacgagggcgccgaaggagatgatgaacaggcccccttcctcccggaattccgtctcatcaaaaaagatgatcccgaagcttatgcattcagctccactcagtattcggctcacaaggtgccgaaggagctggtcgatgcttcgcttcaggggcctggcggcatgagtgaattcatgggccagtggcaggatatcttaaagaagcaggagcaagaggaccaggctactggcagtgactctgaataaacaacttcggctcaaaacgctgcgtggtataaaagcatgcattcttggtttagtggcgtttacctatagcagggaaattaatactgtggattcgaaggttttgtcgtggactacaggtcaatccacacattatcaataaatgaaatcaatatatgaaatcaatatataattgtcgccattggtcaattacctacatagaatgtgtaagagaaggttatatgctatgtcatatcaacaactccagtattgtgtgtattacttctatccttcgtcttgaagaacaaaatatgtatcgtcctgtatcattatatcgaaaaatgaccccgagcaagtaggagatacagccgcaagctctagtagctatatacaaaaaacctatcaagcaactaaagcttatgccttttctcaccagacgccaacctccggaactcttcctgcgggaatcccttcataaagcgctcaaggcccataaacgcctcaagaccattctggcgatccaaaagctccctctcaggccgccttaccagctccttaatcttcaacagactagtctggttcaagtgcgtaccaagacgatcatcaacctcctcaagcaccttcttcaagaacccatcagagtcatccttctccccggactccggcgcaataaccttattgacaaagccagccgaaaccagctcgtcacaggtgatccgcttgctcattaggagcgcctcattcgccttggcgatgcccaggcgctcaacgaaggcgcggctagcaccgccttcggcgacgagaccgagcgaggagaagggtgtcaggatgaatgtgtgtggggcagcgtagatgaagtctgcgtgggcgaccagtgcggctgagagaccgacagcagggccgttcaaggcgacgacgagaatcttggagtggttgtagaaggtgcgagtgacgtcgacgttgtttgcgacgaagcccttgactagctcgcggcgctcgtttgagttactatcgtcggggcctggacgtatacttgtgacgtcggctccgctgtagagaggagattagtgttagatatagttgatcttgtcaagctttcttttgggatgtggtttcgcgatatctagggctggattggggctgttgatgacatacgctgagaagaaacgaccctttccggtcaggactgtaatgaagatatcatctcgtgagtcaatctcgcgtaaacgctcgcctagaaggtagtataggtcggcattgagagcgtttagcttgtcgggccggttgagtgtcacgatcgccacgcgagcctggtaggcaacggtaatgaaactatcgtttgacattcttactgtatattgtagaaggaaaccgttcaatgggtcaccaaattgaactgtgattgcaatggtctatcatttatcagtcgtctctatgggatatcagggcacgcgaatttgcggggagccgaggcccgcgggaacttactttgttctgcctgagtcagcagaaataagcatgtatgttctgtttgtcctgtttgtcctgtttgatcaaatccaataatcacgcccgtgactggtccggccatggcaccactcggcgattaaagattgaagatcaccaacctacacaatatcgctgccccggtctgctggaatcaggcggtataatcaactgagcacatcctaccaacaacatcgaacctcaaaccccactcttagcaaacccgaagccaaaacacgccgagaaaaaaaaagcaacgcatcagactcatacaatgtcgcaaatattccgcaagttgcagggaggcaacctcgaagtcttcaaggtgcgtatctgacactcaagtcctctgagcgattattcccacctaccgcctcccaccgcctcttcttaggactaaccgagtccatgtagtttgggatgtacgtcctcttcccgatcggctggatgtactatttcggtaccaacctcgacgaccgcttcgccacgaagaacttctggcccactgccgatcaatcgcacaagatcccgctagacaaggacgagattgaccaggaattggcacgtatgcgcatggtggatgccgtgaagcgggagcagagacgggcggcggaggcacaggctcaagcgcaattagaggcacaggcacaggcacagacgatgcagactcagcaatgaggctgcaattagtgggtgtgattgagaggagctggcgacgggggctgaaacacaacatgcgctcattgcccaagtccccgggggagaaaatggcattgcgaaagggccactggtgttccctttggcgggttgatatttgccggggacaacattggcatcgcgctgggaagttacacatgtgctgatgatgggtttacttgtacaacactctgctctgggcatcgagggcgttctggagttttcgtcttatatgtatgttgcgttttcaacatattgctttctactatttacatctgcatttgctgtacatcattctggaaaagtgtgcaaaaaatatcaacttcaatcatggccacgttgcaacgataatacaagctggcatcatcgaccacagaactctgccaaggaggcatatctatatacagtgtggtgtgaatgacccaagaaaagaatgtaataattaataataatgtaatccgccgcactccgacaatgcaagtcataggggtgccgccagttcccagaacacaagaactccaaacaagcgccggccgacaggaagagtgataacgaggttcccttcgatatcgatatgcaactccaaagggattagggctcctcacttttgacaatagagaatgcaactgcaaccattatgcgggttttattcaaaggtcagccaagcgctcggtcgaggtggcagcagcgttctttgccgtctcgtacatcaaatccccgatttgcgtggccacgccattttcgccaaagaccgaactgattgacaaccgaccggagctgaacaggcgctcgccggcccagtagtagtaaaggcgcccgtaaatggcgagaaggtggtcgggaaggtaaatgtaagtgcccatggctatcatggcaatgaggccaaggagcagcgtgtctaaataggaaacgaaaggtcagcatggtgtaccaagagtattgtgaacggggaacaggcgcaacatactgaagatgagcttctcgatcggagtaagcatgtagagggagaaggtcacctcatactggtagatcttcaaccgcatccagcggaagaggctagccacggcccagataatgaagtccaccattcttgcggggtattcagagaattgtaggatgctccagtctttcgttgcttcttgcggcttctggtgccgttcgtttgaatttttttttctctctatagtctgagcaagagccaccaatgacaaactcgggaaatagacccggagacagtcgtatcagacacgggcaatatgtatgcccggctggagtgtggtgttgtgcagggaaaaatgatccacgatgttctaaatcaacgcggcgcggggaagggttgacgtaaggtcgcaagataccgtaggtacttaggcaattgagggatattcgttacaatcgggaagagcgtgttgacagagacgttggggttgataggagtaaggaagagaggataagactgaggtcacgctttttggtggactgtgctcaataagattccccttaaaatacttctgttttggttctgaaaatggctgtatattttgtttatttcatgccgttttggtctgagatatatggtaatatcagtatgcactagtaatagcataaacctcggctggtcgtctttagtatgtctacagcactctaatttttagaggtttttattcaatgttctaatttcattctttctcgggttagataggtgtaatttatgtagtacatatgtatagatacctgtaatgtagtgataaaggggaaggtgggagaaatcagagtgaagtaaagtaaatttcaggcattaacttgctctttgcggaggcctaaggccaccaaccctattgcctgatcatttgtgttttccgtgttttgccgtgacaatttgtatccagtacacaactctgacgctattccacacgcgagtctcaagtactcgatactttatgttttatgcacaatctgtacaatttagatgtcccgacattggatggcataattctctatgcatagcatatgatttatgtacacatctgtctgtaactaacctatgtattctaagcattactttggcaacaatattgagcataacaaactagatgtactactagctaacagtctcatgtccttttgctaatcaggatgatttgcccatacataagggcatggtccatggataactaagtgttctactattcagacttcctagatctcatttatccagtcacagtgaggaaagcttataatactcactaccatactactaaacaacaaaaacagaaatatatccaatagactagaaagagaacctccatttatctagaataccaagatcatagcccttgagtcaaccagcaaacaacccaaagtagccaaaaaaattaccattcaagcttatcttatcgcaaacgtcggcaataacctcaaccttgaacaaaccacagcacgaacaccaaacgcaatgctatctcgcctacgctggcggacattgtccccaacactagcagccccggcgcgactcttcagccaaacccccatcatccccgagaaagccctccccccacggctcaagatcaacgatgccgacatatcaatatcctacctaaaaggcaccgggcctggcggacagaagattgtacgttttaattcccaagcagattcctagataagaaccagaactaacaaaacctagaacaaaaccaactcagccgtccagatcatccacaagcccagtggggtggtaatcaaatgccaagcaacgcgctcacaggctcagaacgcgaagattgcgcgctcgctgctcgctgatagagtcgaggcgctgcagaaaggggattctagtcgggttgcgatcaaggctgcggcggcgaagaagaagaaggctagtaaaatgaagaagacgaggaggaagtatcgggaacttgcggagggagagaaggagggggaagtcggtgaggaggaagaggacgaggttgagataatatgggatgatgaggtaaaggagggagaaaataaggaggctgaatcgaaaattggaggtgaggccaaaacttccgaagagtctggaaagggtgtgtgatgtgagatttatgctgttatgtgttttgggatgtatactaggtctactgcattggtgtttgagcgtttacttttgagagatttacattcccgtggatgttcttctaatggaaaatcaaacaaacatttatttcatggatctagtgtctcatcgcaacatgcatatggtaatagggggagtggggaaaaggattattcctccgaaggagaaagcaaatccatataggttgaactttttgagttggaagggaagatcatagcaaagccactaagaaatgtaacttgccagcacggtctttgactggtcgtcaagacgctcttgggcgaattgcgaaatacggccactctgcttgctatcggcttctttcaagtacgagcccacccaagccttgaggtcagcaccagtttcgggccatgggtccttctgctggacacggatggtgttcagaggagtaaatccaacaccgaaggacatgtcttcgatatctgcatcattaatgagatcatccctggctgcaggcagcggcggaagctcgaggagcttgagcaatgccgtgcaggtgaagccccatcccttctggctatagcgagtggcaaaggcctgcgagttggcaagggtcttggtgaaggagatgatagctgtcttgcgatccaaaggccggacaagcttctgggtttcaggaagaatgacgttgatatagatgggagtgaagagtctagacattaattagcctacgaccaatttatactgtgtaagaatacatacccctcttgcaccttgtcggtgacttggatgataaagtccgcgctgtagcccttgttatcctgcgccgagaggaagtggaagaagcggacaaagcgaagagtcaggttctctgtcttggaattctgcagacgttgaagaatgatctgcataatcatgacaaagtagttctcaagggcagttctaggggaagggaagtcaggtaaccaccaattaagcgcttggaagatgtgatacgtacggtgggaagttagcaacaactgtctccaggagatcaaagccaaagctctcattggccttggtagaaactagtttttggaagataccaaggatgggctcgatctggttgtgttcaatgatgaactgcgaaccacgcggaatgatcgaggaaagtagccggaccaaggcggggatgtttcccttcgaatcccacataacaggcatcaggatagggccaataagctcttggtagtaggtgggaagggtgccggatgggttggcctcgagcagcgcagcgaagagctggaaaacgtagggcatgaattctgaaatttgtcagcaagggatcaaagatatcgacttagtttgatttagctcaccctgcacatcattctgaaggatagctgcgaagggcgcatacagcgcttgctcgagcttgtcaggattcgcaggagcagcaaagctatatcacgttagcttctagcacttggaaacgaaaaatgcgggaacataccggatgaaggcgcccatggcttcgaagtggaagtagtaaaatcgggggttacttgggttcgcgctgatgatattggtaatattaatgaagcgctggaggacgacgtccgtgaaaggcaccacgccctccttgatgacaaccaaaacccgcatcacacaacgcatcaagaactcattctcttgcactttttcaggagctggatcactctgaatcagctggaagatgtgctcgagaagatccttagcaagcggtgtgatctcagtgggtggaatgactgcctgtccttggctgtcggtgaggaaaagtactcgctccaaggcaatggcagcgtaggtatagacgacaaagttcgacgacgccaggtgcttcaccagcacaggtagaacctgctgccactgttccttggtgatgatactgcggaaagtgtacaaatacttgatagcgtcgaccttcaggatagggtgaacaccatcctcgttgatcagatccgcggcgaggttctgctggaagtaatccgtgatactgaccaactggttggtggcagtgacaccgtgcgaggaggtcgcagtgcccttggcagcgatagcggagtaaaggtacgtcgctgtgtccttggccttccagttggatgaatccttggcatactctgccaggtagtgctgggtatacttgaggacaacctgggtcactggctcttcgaatttctctgccagcttgcggaggaaatcagtggcagctcggcgtctggtctcgctatctgacccttccaagtcccgtcgaatgaactcaatcggctcgtcctcgaagagttcttcgtcggactcacggaggctcacattcggcaaaatgaccttttcaacaatctggctcaaggtttcctcggcctggaaagaagcggcatgctcgggcatacctgcgacagaggtcaagaagtgcagtgctcggctgaccaaaatatcatacttggtctcctggccgatggtggtgaggaagttccatgagctcccaatgaattgtccaacgtgaggctggaacacatccatgtacttctgcacgtagagagtcaaagcctcaaatattccagcgcgaacatattctaatagaccagcctccgtatcgtcgtcggtatggagtaattgattgtcgtaggtcaagtatttgaggaagattgtcgagattccggtgaggttgtcttcgaacatgggagggagatcgtgggaggaaaggtcataaaacagcttgaccatcaggttgagctgagtaaacccttgagtcagattctctttgttggtcttgttctgctcaagatagttatccagtgcctgaggtgtgttagcattcggcccaccgaagcaaaactgggtagagatccgaagatacctcgaacagggccaggaacggagtaccgaacttgttaagaacgtggttaatttcagtgtagagcgcatcagactggaacaaaggtctccatctcttgaaaatagagtgtgcgacttgcaacacaccaatgttgacggtggggttgtctggtgacagcttcgagacgaggtcctggagaaaacaaatcgtcagaactaacattacaatgctttgttgaatcgcaaattacatcaaccagagtatcccaccgctcccagaagtcactgtcggcgatcacactaacggcctcacccagctggctctgaattcctggcggaaccgagatcatcaaggagatcagctcacgcttgagagtggtgacttcatcctgctgcagcttgtaatttccatcttcgtccgtccagttgcgcttgataaagttcttgaagcatagagcactagcgagacgtgtgttgtagggtgtggtgtccgatgcggtgatgtgaagaagctgtagcgagaacccgggcttctgttcttcctgacgcaaagtaatctcggctagaagaacaggaatcacatcagtcaatactgcttcaagtaatagaggggtcaaatataactcacctgccttgttttgcctggggtccaagcttgcctctaacagagctccaagaccctccgccatcttgttacgtggggtatcaacacaagtgagggggttagatgaggaaagggaaagaggaaaagatagataggcagaattgaggaataattattcagaagactcaaaggggagcaagagttttgacaaccacggaagggagaagataaaaagatccaaagctcaaagataataatgcgagcgctcagtaaattgtcacagcccacataaacacagggagtacgctaagctcaatcgggttagaatgtcacatgcttgagcctctctctgcctcaggcatcaatattaccctatcggtctttcctgggtatggtcttagaatatagaatgagcgctttgtatgaatgaaaacggaaatacgtagaattgaagggtactgttataacgtaaatatttttattttattctctatattcatatgcttttcgtgacaattacaaactcctacggaaccatcatttgtaaccattaatgcttagacaacaatgttgctgacgccgttagccaaatccatctccttggcttgagacaaagccttgaccttgtcgaaacagccggccgcggcggaaaggaatccaaggaatggcttgctgggtgccagcacacgagaaatgtactcggggtggaactgaacacccacgaaccaggggtggtccttcagctcgacaatttccatgcgctcgcccttgtcatcctttccaatgaagtgaagaccggcagcctggagctgatcgatatactcggggttaacttcatagcggtggcggtggcgctcatcgatagaagtgcggtccaatccgtaaagggaacggagcttagaccattcggaattctcctggaagatggtaggacgggaaccaagacgcatagtaccgccaaggttcacttggtcaatctcaggcatgtacaccacaatcgggtggttggtacgctcgtcaagttcaaccgagttggcaccctccaggccacagacattacgagcgtattcaataacggcaatctgcatacccaggcagataccaaggtaaggcttggacttggtacgggcgtggtgggcagcgcgtatcataccatttgtgcctctggtaccgaagcctcctggaaccaagattccatgggcagtgtggacatcataccaggccttgtgatactccttggagttggtctcctcccactcggtttcgaggtgcgaggcatcaacccaaataatgttgagctttcggcgggaagccatagccgcgtgctccagcgacttgatgacggacaagtaagagtcatggagactgacatacttgccaaccagagcaatgttgacagtttcaaaagtgtgctcttgggcagtcgtaagggtcttccactgtttccaagtggactgacctttgagtaactgatcctgagaaatgttgagcttcttcatgttgagaaggtcacccagaacgccaaggaacccttgttcctcgagaagcagaggcacgtggtaggtagagctgacattgtgcacaccaatcacctgctctggctcaacctgacagaacatagcgatcttatcggtggtggccttgtcaaggggtctttcgcaacggcatgcaataagatctgggcttaaaccagccgagcgagcgtcccggatagcctgctgggtaggcttggtcttcaattcatcgtggatgatgggaaccagggaaacgtgctagaaaaagtcagaattgtctgaaatcgaatggtctgttggacgtacgatctggacgaaattgtcctttccagcccgacggcgcagctgacgcagagcctcaacaaaaggagcactttcaatgtcaccaagtgtgccaccaagctcgataacacaaacatctggctcctcgttgctgtcgtcagcgggggttctagccacacgctcgatccaatcctggatagcgtctgtcaagtgcggcacaatttgcactgtacgtccaaggtaatcaccacggcgctccttctcgatcacatgcttgtagacctttccggttgtgatgttgttatcccttccaagagtaactccaaggtagctagatcgcagaatatcaatcagcctcttgtttggcttcaaaaaaactcatacagaggagaatttaccgctcgtagtttccgaggtcaagatccgcttctccaccgtcgttcaacacgaatacctctccgtgcctaaaaaatcatcatcaggaacagcgttcagaaataaagactgatcaaccacgtactcggtaggggccatagttcccgcatcgacgttcatataagggtcaatcttgatcgaggtgactcgagcaccctgggtcttcagcagcaatccggtactcgaggctggagaaagttagggccgaggggactttttcagttcgatgtatagagaggggtaccaattacgcccttcccgatgccactgatgacacctgttatacatgtgttagttattgctcgttcataagagatcgactcagaataaatacctccagaaaccacaacgtacttcatcctggcgatgatagggatgaaaacccgactgaaaaacgatatgtgagatttgatattgagtttaaaaagaatgaccagtataaccaaagaccctcgaagtagaaaagaaatgtagggtgccgttcctggcttctgccaagggggaagaaagaatcaaataatttttgaagctgtaaaaaaagcgcctttccgtggtcaccgccccccactttgattgacttttctgccgtcccgataactatgagtcatgtgatttgaaagagagtaaagagagggaatatgcttgatggttaaatacgatgagtctgtagaggtaaattgctcgaaaaactacttataacatgtccattacaacctccaggtatgcccttgaccatccctatcaaaatacatttaacaagtatgaacttcgctttgatcctcaccgccccgtctgccacatataatgggcggtgtatgatatcagtactccgtacatcaggtgattgggctggaatatcttcatatccgtgcatgattgattaacccccctcaatccacatcacatcacttgcttgttgtgtcatcgatctggtggggtatactggttttatttatattcatcatctgaccttgttatctcggtccaattcacgatcagctgccaatcagggtcgctttgcgcgcgggatattgatcaccaaataccgactgtttcagcttgctacatatatttgagtccctatatgtgcattttctgatcataggaacatcctatgtagttaatcgctgttgtttgtcaatttccaaagggtaaaaattccctatctgcccttcgactgcctatcatggatgatgcaatacctggactaacttggttgtcaaatagttcacaaaccgcgatctcctgactctactctctttctgccactgggcggatgtcttccgatgatgttccacacttctcccagcacaaaccctcgtcaactagtttcgcagatgtcctcaaaactctagctgtcggtcgatccaaatcgcattccccagtctcattacaggaaagcagcagcgactcactgtcttacactgatacctccggaacaaaccggcgtgcgcacggatccgaatcaatgaatcgtgccagtttcatgtcgagttcctcggacactcccagtggcctggatttcgagacctcactccacaatctatcgcaaaagcaaaacctaacgcaggcgattgaagaagcggagggtttgtcaaaaggtctatcatggttcacctccgagcagtccgtggtgctttgggaggctgccgagtacctattgcgtcatgaaagctcgctggatgctcagcaaagcggtgccagattattagaagcgattgcagcccgtcaagatctgtctccatccgccaggcgcctagttttcgaatcgatcacttctccagccgagccggatgtgattgctgcacgcgtacattcgttgatctccctatcagatcatggcaggaaattggatttcgcaggttcctcaattctccatatcatctcctcgtggattgttccattctatgaaacgattgcatccgcacgatcaaaggcgaaaaaggcaaaatctgtcaaaccacacgggcccaatcacgacgaagcagtctttggagatctcttccaattcgcggtcgacctgatcactttgcaacgaagccagccaacccaggaggaaatcgaaatgcttctcacggaaatctttaccgtttgcaggagaaccagtgtcgcggcggatatcaagaactctttggctgtgttcgacgctgtcattatgtatgccgatgtgcctgacataagcttcccaattctcctggaagtcctttgcagcatccatgcatcagttaaacccctctctgggcccacctcacgagcagtgcgcagtctagcgaaatcacgaagacaggaggagatggtaaacacactccatgaattcctgggagattcgtgcgccgctgaacaaagtcggaacttgaatgttctccgtggtacactttatgtgttctcggattttgttcgtgctcatggccaagatggcatgccccagctttccttcgatcaactcatggaatcattgcaagtcattgctcaaaaagacgatagcagggtggatgccgacctgttagatctttgtctcaacattctggaaggggactatattggagtcgcattagaacaggattggacgggatttgccaatcttctcatactctgttctcgccgactcgtggacgagtcggcgccatccaccacttctgcgactagccctcggctcaaacctacgtacgacgaaaccaaatcctacattctggtaaatctcatccgcattgcttctgtgctcgaatctcagtgggaacaactcaacagagagcaaaagcaacatgcggtccggttcctcatgaagatataccagcacattgagcctccacaggctgaactcatcatccattccatgagagaagacaagctttgccatccttccaccgactcaaattgggctcagcattgtcgtgaactagttgagtgtttcgttcaaccacggaaacaaagctcggacatacgtatcctggctttggacacattgaaagaaggtctttccggccatgaggatttacttttcgtccaggagcacggtctactcgggcttctattgaaggatttttcggcagaacatgatcttctcttcttggagtccctggtgtctttgttgaccggcccggcgacacagtacagtgatgatgacgcgttcaagttgctgataaacaccatcgcagcaccgatgcagacggatctccatcaagaagaaccgcgcgagaatcctctgaacaatggatctcaacgccgtacatccaccacgagtgtcttggagttaagcttgacaaacgtctgtgccgtgggcctcgtgaagatgatgctgcgtgccttgaacctctccccaaccaaagctgttatggttttcgaggcacttctagacattgctcaatctccaagtcgaccaatagactctcgtttgacggtcttgaaactactttttcgattacgatgtgactcagctgggtctgtcacagtcatatcaacctccgagagtgactttttgatgaatgtgctgggtcgcaatcttgatggtggctctaagctacaggtccccggcgacagccccacctgcgagattcctcagaatgataactcaccaatctcgccagtcggaaagcttccaatgagagagtctgtgtcaaccgccatgtcgaagtcggccccggggcgtggctctagctctgcccgtggctcaaagttgacggcgccagtgtggacatatgctttgccacaagtgcttccggagcaaccacctggggagtctagtcctgtcgtatttgcttacgctcacccggaggactctacccccgaatcagaaacaatagaaacaaaaaccaagggggtgttgaaggtcaagatgtggctcgaagttgtgatcaccttgttgcagcgagaaaccgactgggatgtttacagctacattcttactcatatcggtccccagcttggtaacaaagactttttcagagatgctatccctcagatcacgctccttcgcagcattctgtgtgatcaggtcaagaatgaaaccttccacgagcctcccgagactaccggattgaaaaagagcgatgtggctgcctgcatcttcgatgcgctttgcatgcttgtcagctatcacgaacactttgccaagagtgaagaggatgatctcgtccgagctttcatgcaaggtatcatcgggtcatggggcggcacatcccgtgggtgtattcaagcactgtcactctgttgttatgaaatcccaatgtcggtgacgaaatcattgaacagcatccttgataggatgtcaaaggtgatcaccatgtcaaacattgccgtccatattttggagttcctggctctgcttgcacgattgcccgatgtttacgtcaacctgcgtgaggaagagatccgcactgtgttcggtatctgcattcgattcttacagacctctcgagagcatcggtacaaagcctctgaattggccgcaagggccgctctgtcaaaccaatcttcccagactaagccaaaggaaactgccgcccatgcaaatgaagctgtcgagacctcccaagacggaatgtcgaaatatatctcgaatctgacctaccatgtcatggtcttctggttcttgtctctgaagctccaggatcgacccaaacatgtgaattggatcaccagcagactcatatatcacgacgaacatggaaaagaggtagtagaagaacaaagccaagttttcattgatttgatgcagcgagttgcttattcggatctcggagagactatccccttcgaaaccttccctccttcccctgaggatggcccggttgcaaagaagtcctgggttgtcggcatgagtatcgtcactgtcgagagcgccggattgtctggattgtctcaggtaaccaagcgccaggcatctggtaccacatattctgtctatcaacaacggacggccccagttctgccgcatcaagttcctgcgactccagatgcccatttacattccgactccatgcggacagcagtccttccgagtcatatcatgcttcagttgactgctactgccttccctacacctacagtcatgcagcctatcccggttccggaagacgatatcactcgacgtgcgattagttactttgatcgcaccgacattgtggacggacatcgtatcggtattctttacattgacaatggccagacaaaggaggcggatattttagccaacactggtggttctgcggattatgaaaatctgctgtcaggattgggaaccaaagtgtcgctccggaacccccaattcaatccgcaaggattgtatgccgataccgatggtgaatacacctacgcttggcgggatcgtgtgactgaaattgtgtatcatgttgcaactatgatgcctacggactttgaccgtgacccggcctgcgtcaacaagaaacgtaatcttggcaataatcatgtcaccatcgtgttcaaccgatccaacttgcccttcaactttgacacaatcccatccgagttcaactctatcaacattgtcataaccccgtcatctcgaattgcctacgacgaaaatggcaatgccaattgtgagacagacccgcagaagctctactacaacgtgcaggtcttgagcaagcccggattcccagacgtctcacctgctgcggcaccaaaggtcatctccggcaagaacttggcggcctttgttcggattcttgccctcaatgcgtccgtcttctcacttgtctggaacaataaaggtggcgagcatacctcgtcctggaccacccgtctacgcgaaataaagaaagtccgtgagcgggctctcgcagcccaaagccaaggctctgaggccgccgaagtgacttatcccggtctgcggcgaaataccaaagccaacatcttctcggaggaattaccctctcgtgcaccgcaagtacagacggatttcgctgcggaatggaacgcagcggcagacacgaacattgtccagaatttggatttctcccgctgggcccgctaattcgtctttcttttcgagcgtcttgacgatgacaaccttaggcgagatatcctctccttttactgtctggatctacaagacaccctctcccctccctgatattcattcactccttatcttacaccacctctccctccacctttcctttcccctctcgatgaccaatgacccctagacgacttcatgtacaccacttgtgtttttttttcgtgatgcaagacaattgtcgcatttgtaaatacccccttcccgccccaaaagttttttctttccagtgtcgtcttgcctgtcagcgactgtcgcgattaggattagggttttattagtgacatgaatcagtgttcttttactgaactcagcagccttctttaatgatcatcttaaccattcaactctatttgtgtaaaaaaagagaatcccccacgtcatgtaactttatgtgcttccctcgctcctttttcctctccttctcattcaccctctattccttcttcttcttcttcttcttcttcttcttcttcttcatggctcctagtctaaagtgaactatactcgtggactatagtgcagatatatatagtgagaatctgataaatgtatagcttgtttattgcatagaccgtagtcatgattataatgaaggatctaactactgacacatatagttgaaccaaaaggagatagaaaatagaaaggagggaaatgcgatacagagcatgtacaagtgtgagggctaggcgatgcagagaaagggaaagatgggtaggttttgttgtgtacaagtagaaaaagaaggttggacaatggaaaggtcgatccggggacagaaattcacatcccaagtatgcaagttctgtgtctctgggattggaacttctattcccagaccgtaattccttctcaaaaggctactatcaccaaccaaagatctcaccaacactgagagtattccagcgcacaccgccgacggaaacgaccatcaagacaacttcgacaacaaccagtaccaccgagcccatcatgaagcgagggctgaagatgcggtagagcatgagatggcggcggagatggccggcccacatagtagtggcgagattgatagtcgccaggtagaggatatgggttccggcagcctgtacgacatcagagaggatgcgtgtagcggggttcttgttcgggtttgaagcggggacacggtcgtgggtctggaggggacgtttccaaaggacggttaaggggacggcgatggcagctaggatctgtgcgccgaaggtattgaggatgacgagtagtggggaccaggggtattggattgttgtgagggggatgaaggctgtttcccactggatgctggagagcgtagcctggtggcctgttttgaagtaatagaaagagccaaggacgccgaggatgacggggccgatggaggagttcgacatggttaggccgtttgtgtcgaggatctcgaggagagagaggatttgccagaggaggagcgcgatggcgccttggcccattggcttttgcatgaggatgacggcgagggcgaagttgattagtaggaagcagaagtgggttccgtagacattgccaaagccgaggattgtgactgttgttcgtgggccttgttgctggccggcgactataggggccggtgggctgttaggatcttccgtgggtttgctcacgttgatgctgacgcaaggcttggagtaaaggtatgctgcagtgcctgctgcgaacgcgagggcgaggacgaactgggctaggaagacgcgggcgaacttgagtgtttccttgctgacgggtagccactcgccgtcgtcggcgccttcgagaatccagaatatggaggcgacgaaaagaccgaagcggaaggcaaagccgatccatagagatgcgacgccttgataggacttggagccggcgtagtaggaccgcacgacgctgggcaggaaaagagtgaccaggaaaggaatggcaagctgccagggggcagaagtggaagaagtcgacgaagcgtagtacgtggagcggcagaagggcatttgttcttcacgacagaggcgggagaaagatgcgattcggcctaggatcacaaagagaatggagtgatatacccccaagatacggtctgtagtttgcttttgtcgcatggacgatataccggcgcacacagcgaatgtagtgaggaagaatagaagaatttcgtcttcccagatagtgtacgagttggaggcaaatccaatagactgagaaacggtgaagaaaagcgcgagccatccccacatgccattcggaagaggcagagtcatgttcgcaggcttcttgacgagagcgggcgtggctccaatgatgcttccagcggcggccagtagtacggccccatcgaccgtagatatctcggtcaggccagtcaaacccaatgcagaaccggccacggcaccgacgccagcgccgacgcttgcgaattgaagcagacgagacgtggcttgggttcgatctgtcttcaagcctcgggcatagatgatcaacaagataataccagcaaagagaatcacaacaccttggatcatgcttggcacatcgaatcgagcccacaatccacggcagatatcaagagtgtgacgctggtacttgcggtagagttcattgctagcctgagcagcggtcgacttggacgagaagcccttttgagcggacctccactcctcttctgcagcagtccaaagtaaagccgcctcttcatcatcaccagcacctctagcaatcgcatattggtgctgatatctcttgacttgtgctgcagtcaaccggttgacagtcgctagatttgcccagttgttcccacgtgcgccacagaaagcctcttcaataggcgatcctaggttattgaatgggatgggcattccaaggagtaaagacaacgtcggaacgaggtcgatctgaggcacgaatctgtcgcgcgcgaattgaggcgggagaagcgtatccttccttgtgcgtccgaagatgccgcgcttggagtacatccacaacgcggcctcaacctcgtcatcagactcaccgccgtggtcgcctttgatgtccatcccatgatctcccatgatgaccagaagagtgttatcatcaagcgcagcaatgatatcgcgaatgacacggtccatttcctgaagcttggatgccatggcagcatgattaggaccatatcgatgacctgcatgatctacgccgagataatggccaaagataacatcccatttattcctgttctcgggctggagaagcgggaagagatgctccgtgacgccattgtcgacggtatgcaagtcccagacgttgaatgagtcatacgcatgcgtgagattggtatcaaagtagcccgggaagagcgcctgccaggtatcgtcgccgaggtgaaccaggttcttcccggcgctatgcaactgtgcgacaagattgtcctcgtcgatggcggttccggcgaagttggagcctgcgtcgaggaaggtgggcagggttccggtggtcaagcctttcagacggttcagggttgttgtcggaggatcggcaatgaatggcaggaggaaggcgttggcggggttttgcactgcggtctcgtagaggacagggatgttattgtggaagaggtgggctgtatcactctctcccttcggggcgaatggcacagtgaaatcataacgaagagcgtcgattatgatgacaacggccttgtcaaatgtcttctcgtgccagcagcctttctgctgtttactccctagggctgtagtatgttgggctaaagtgtcctcgaaaggcagtatgtcgcatgatgatttgttctcaaggaccatgcgcgtgaggagaaacccttttgtgaagagataaataccggcgacatgcaaaagtctgtcattaaccagcgtcagttcacatttattttttaacacttcaacccggcagcgggccttaaacctcgagctctgctaggcctaggcggaaccactcacaatatccacgccagaacacccatcacaccaaaatgcttaaccttaaactcatcttcaagctccagcgccttctgatccaacaggccagcttgcttcagcttggactgcccgccagacgatttctcggagctgcgaggggaggcagctggaagaccgcttttaggactgctgggatttggagtccccatagtccctgcgggtcgcgtgaccatttctaaggtctattgtattgtcgcgggtcgaagtcggggccagctggcgcaccaggtcgcagatctggcttttggaggccgaaagggcaccgaaggaaccgtgaatgatgagccacggtgtgttttaggcgacagggaagccgggagcaagcacaaatgatccggttgaatcggttcaagcgagaaccctcgaagtagggtaaaaagtataggcgggggggcggaggagatggcggattctgtgctctgtcgaacggcttccctctgtatcaagaaactatatcatgcacattgtttggaggagcaatgtataccaagcgcaaataatagggggaaagctgtgtaagtaaagagaataattctaatttccctgacagtcgcggaacccacgggttggggaactcggcctcggcgtttctcattggccggctggcagcggatacaactacatagtacaccacactatactgtatacaggagaagagagagatatctggggaaaggatagattccagatttgcctaaatgtcacgaaacataggagggctaagtacatacattatccagctgccgggtaccgaaaaaaggcacatgagaaggaaagtaaaatagagggtccctcaaacgtaaaaataggagcctcataaaggggggtgaagaagagaaagtcaaaagcatgaatagtcacaaatatatcgggccctaggaacatagcagggacgaaaggtacatgaggagccaggcttaagaagtcaaacgccagaagagaaaaaatcggcaggccctcgctacgaacgatccagtttcaatgaatattggaatccaagcagtgtgagctacccatgagtctgtccagaaaccgggtattccgacggtgtgcttttgagaccaaaatagaaactgaagggcatatgtgcaagccatataggccaaatcggaaaggagagatatgtaaaaggtgaaatcgcaaaaaatatttgccagggtactcgtcatgctttgagaggtcgttgaaggtttgagagagattgagcgctatgcgggtgggatacgcagtcggtcaattgggccagtcggtttgacacgcctttaatggtatgtcttcgtctcctctttctccctcagtccacccatccgctcgatgtccagggactggaagcgaccggtgtctgtgctttggtagggcggaagatcctcatggcacggttccaagccgatgctgcccgcgtcactgatgcggaccacgaccacgcggccagaggtgcgtttgccgcttgcatcctcttcttctgggaaggtaatgcggatctcaggcacagggctcggtggggggctgtcggagttgtccatgaggctgcgtttctcatcatagacaagaatggagtcggttttattcgtcgaaatggttaggcggcgcctgttgggtgactctccattgtagactgggagcaagtttttgttccgagactggcgcttgcggcggaggatgagcaggccaccgaccagggcgagggagagcagaacgagaaccaggagagcaatgagtaggtctaccatggcgtttgagagtccgccattgctatcatcgcgagcaacaatgcgggggaatagattgttcatcttgttgattgtcgattgtggattgtcggttgtggggtgtcggttgtcgatggttggattttcgatgccgagtttgagaattgtatgattggaagtcgacagctatgtatcgtgatcgtcgatttcaaattccaaggaaggtctcggaattaatccggggaagtaaatactgatggaatgtgcgtgcaaatatcggtcacgggatcgtgtcgaaaaaaagggcgaagggtcgaaacgagagtgagtaggttaacgaaagaatggactgcaaggtgagccgctgaaagagtgaagctggcacctgcgaaggaaaagaatggaggggatgagatgagaatgaagggaaaacagaaaagggaggaaggggagaagaggagaaggttgcaagcctagaacggcttgctattgttagtgtcgagctaagctcttcgtggtttagcctggttccttgggcgttgctcggggcctcttggccgacaggggttagccaatcacaggcccccagtgcctggagaacgggccctccggggtcgatttgcgccctctcattcggtggctccactgaactatgccgattgtattttgattcccctgagatcctcatggacggcataaatctagggctatacgctgtgtatagattggatagatttagatcgcaaacacaaacatcagtaaatgtttcgagacaaaaaagatagtcacgggtagtgcttattctggttgcacaagcgtgaatcactcggatttaggcgtacggtgcaatgtcacgagccctaattgtctaggtacatactacatagtgacatgatctgttctctggggggatcctcgtgcgaaaataacaggaaatgagtgtttcaaaaatatgtggagagatcatgatctcatgcacctgatcttcgagacataaacaaagcccttgtttgcgtcaaccaaccacaacaagtaaagaagtaaatcgcagctattgtttgttggaaataaacaaaagaagtaaggaacaaattgttcattttgaaaaagtggacttattatatcatatagacaaagttgacttagtcgaactatgcaaagatgccagagatatatttctctttcgctactcgacatactcggtacgctcgccttagatcacatgaaatcaagcaaccgagacagaactggacgcgtgattttaaatatatctaggtaactcatgaacaaacctttctgagtactcgaaggtttcattgaagtccaaacatttacatccatactcgaatcgaggtaggagatgagatcgttgatctctgtttcatagattggtgtttgcactgtttgcagaagtggataactacaactaggtatcccacttcttacttcctgcttccccatctgttattttttaattaaagacctggcttgtcacaatgagctgtttccaagttaaattgagcaagctcgtgtgaagatattctcgatgccgacccaacgcttagcccaaaccacaaagtggggttcggaggctcgtctcacctcacgtgcccaagctgaggatagtttgacagactacaacggagagacacactgatcgatataccgaaaagcaaattcacacggtcggccgcgctatgtcgtgcaattttgactgctcggctcccacccccttatccccaaacagcgatatcactgggattggggtatgagtttccctttctctcggccgcggacgcatctcacactcttagatcattatcaacaatatcgtgactaccggcatcgctgtagtgatcatttcaatttactacttcactgcctacgatcccatccgcgacctgcctcatgatggtcaaactccgtttcgacccaacccagtggacgtatcctctttagcattgttcaaatcatacctaagccctttcgtcaaaattgctaggagcaaaagatttgcgaatgtcctaatcaaggtgggtggattcttatgagatcggatcggtgaatcatcaaagtaacttcgaaaaacagtgcatccgagcaatgagcgatatgcaaatcatgacaggctttttcctcctgatcagcgggtattcccagctcaaatgcggcctggcaacctatcattggctagtcgttgttgaccaggcctggctttcctgcctagtccagttatcctgcttaacgcacctacgcagttatttccacaaccgccctatcgagcggacattacggttactagcagccggtgtatcttcgataatgttgatcgtggggcttagtttcacgggaaactacgattgggcctttaacgcagatagtagcgatcctgatcacccgacgattagtgaccctgcaatctgttatatgcgcgctcgtccggcgatgaattcggcctttttttcgatgcctttctcgataattttgattatctttggatttgcttcgagggtgattaacctctacgatacgctttcagttagcgttgttagagctagaacttcccttgcaggacatatacgagggttattacgcattgtgtataactggagccgggcgtctcgctcgccacgaagtctgaaattgacacttggatatctccccctcttagctctatacctcacggggtctgtgtttgtggatgtgtgggattccgctgctatagaggtcagatattatctatgggacgtgtgttgattgtattctatgttctctaactcgatactaggtcgtctggttaatcatcgcctttgcattcggtatcacccgagtgataggaataatacatcgaccggaaaagatgggcctcgacgcttcgttgactagtttcaatgattggtcgtttggccaagttggtgctatggtggtactagccgcaccgcttatcacactcatcgggttgttctacgagggtgagtcaaaccatgattatcgtctagaatcaactgagatctaacactcgtgtagaagacgagactcgtgtacaggatgaggaacctctctccgacagccaaaccgcaccaccgccggaactcccggccccttctatatcaaacgtaatcacggacctcaatgatcccttcaaggattggatctcgcactctcaaatattctatctggtcgacggacatatattcacaatgctcataagtgttttcttctggatggcagagcgtgatcctttcggcaagataaagaagacattattagaggatattctcgtctcctcgggtatcaagatggttgtacccattcttttctctttgatggtggagactatctttgcggaagctggccctactagtatttcttacaaccttgcgcaagttgtggtaaagctgcacagcctgagctgcctgacgtttttcagtgtctccagttctacgaagattacttattgtctcctgcctatccttgttatctgggctttggcgcatcgcttctatcccttttttcaagctttattctcgtcgaagttgctggcctttctgcggttgtcatgacattaattacactatgatctttccaaatgttgtttccccatgctctggtcctccctcggttttatttgatccatccacattccatgcctcttcgcactacaaacgagagaattagagtgattccccgtttttgagagcggagcgacatcattcacagctgcatagctcacctaccccgtccgatccctctatcgccatgaacggatcgcgactcacgatatctctcgggagagttcacgaacaacatagaagctattgaagccaagaatttacttcaattcttaacttatgtacagaattggtgtgccactggtgtgcggttggtgtatgcaattgaatcaaataacatattccaaaatagtacacgcagtccgggtaccacaaataaagtacctagttccagtgtgagtacttggtgcatggtctaattactggttaaatggtgttagaagagctatttcttcatcatacatagagtgcatctggacatggtcttggagcgacaggtgtttagtgtacctttgaacccttcttcagctaacactaatattatatgttgatttccaaaatatgatctgatcaatagtatgtattttaaatgcatgaatggagatcagcatgtatatatctggcttaggcgatgtcagtcaaagctaaccttcgaagtcttaccctgccagaaatcccccacagtcggcgaccaccaaactccccggccttttgtcgacactgccaagaccgacactcgagatcaagaacacaaccaacaccacgtcgctactaaaagttgtcaactgcaccgactgacatctcctacgttatccttggcatacagtgtaggcagactccgcacgtttgctatgcggtcaggggtcgccaacacacaattcgacacctcacaaacccggagaaaggacgatcacgatcatcacaaatggtaacacggccaacgctcatgaacgctgcatattctatgcaagccagcggtcatcgcgctcgggaccaccgagtatgcctaagcctacaggcgaaggacgcaaggcaggcaatgcccctcagaaatcaatccggggaaggtttctgcgagtgatggtctgacacttgacctgtgcgacccctgtgcaaggatccaaaggcgagtatccttgtcagtctctctctgccagtctatgtctcggcctttttccaatctcgccggggaaattacaccgcgatgactggataccgtacgtcggcaaatgtccaacacatgtttgatgacgaccgttcttctttctcatttctctgctgggtattctatgggcttctgaaccggacagtaagcatttagttctcgtcattcaacaggctgcattgccaaattcgcccacagattgatctaagggtcagtgtgacgatgcgccgaagcaaggggctggccgagtctacggaagtctacccagttgagaccctatttccgcggataatatttatggatctgacacttttcatagcgtgaagcatacttctatggtcgcgcgcgagactattgcaccactcgcagttggggtttggctcattgatctattgagagtcagaatcaagggatcgaagggcaatcccaataccagcgcacggccgaaaaacagatggaacataaacacgaaaaaaagaaaggaaaaaaaggcaagacgaaacaaaacccccctccctccattgggttcctgaccaggcggagaaagtaagccaacgagagagacgccttgccaatcctggaatggtaggtaatccgcaggtaatccacagttagaaaggtggcggcccttggctctttttggtcaagaatgtttccggatccaaccggacgttatacgagatgtttaaagcaagagtactgaatatgtagggcataggcatatatggggtgtaccttacttgcggttaagactaaggtgggaggggcttagtgggcccgatcctccagaaaccttcaatcttttaagataagccgagaattatattaagccttagcttcatttcgggacgaataaggtagaatcccggccgtgaagctggattccttcctgattctttctagcgaaaagtttcttgtctatattagacgttaccggctccattcgggagtatgatctgtcttttataggggttccatggtccatggtcaacacatataggtgttctctagtggagtggtgaggaacttttagccgaagtgtttaatttcccccatggtgacttcagagttgctcgttcacgtctattacatgtcctatttggtagtattccagggactgtttgttgatgtactgacttggaccatgggagatgatgtgagtagttacctaatagggcagtataggaaaggttgagtgtagagtgtatagagagatagaattgcaatagaatatgcaatgcaatgtgttccaatagcagtgtgtatgtatacaatccctatatacatcctctcatgcacatccagatatcacgatgtagaaacaagacaaagagatggggccgggctaaaaagaagcgccgggaggtagatcgcggtgacggtcagatacatgcgccataaacccaaatggctgcaaagatacctgggtgcacagccaaactctaacctaaacgcaagtaccaccatatcgcatgccggatcgccttcttcatatggtcatggtattacgcggcaatacagcggctgatcggcctgagcagtcatccagcttcttgttatctatccaattgactcttgtcctgtcactttttcttcctttcttttcttttccttcgtgtgactcttgcttgaattcgtccttttattccatctgtctgctccctttttttctgatcttttcttttttttccatccatcaccgcctcaccgtcatccactcccccaggacagccacacacaaaaaaaacccttgggctgtcatgctggcgcctgtgtgacagctggactacattaatgccgtgccttgtctctcgtccacattcccttccatcgatccactgaagcccggattctcatccttcttgcgcgagcgcattccattatcctctcttagttccgcctactcgaaaatcttcccccctcagacatccaaccaccccttgcctacgccaatcaatctagggtcccccaacgttctgattgccattctcggggatcgcctctccataaggcacatgaggacgatctgcacactgggagattcctggagcatgcacggagcagagtaacgtcgcggcgcctcctcaattctgaactttccggctaccaacttgcgaccccacagctgcagcaaacgaaagggtgataataatcgttccaattctttgtcaccttgcatcttctatcgctgtcaggctcgatcgaccttcctgccaccttcaacatttctcgcctcatccagagctcgttgctcttcctcccttccgtctcccttctcttgctcctgtataatctgtacatgtcctgggttcgccgttgaacaatacagaggacaacgttcgttttctcccatttcgctctttcttgtgatcccttctatcccctcttttggtgagctttcccttccagacacctgggcaccctagctgcctggatgcccttggacctttctccacaccttgcaacgtttccccagatggcccagaccctgctaacacgggcctcttctcatcgcagtcttatattccttcgtgtacgccgtctctggtgcctggtgcccgtttgcaaatactagtcgacacagcatcggccgatcgtctcagctctgtgatttattactacgagacaacactccgaaaaaaataatcgtttgccgttcgggtacatatcgaattactcttctgccgatcggagatttcctgggatggcttctaccatggccgcgaatgcaaccagcgtacacaacgtgagtgaaacacatgggtgtggatcaatggaatgtcgataataacatcgagtctaggcacgatcgaacagagcgtccaacatgggttcatccgggatgaacgaccgcaaccgcagctcacaaagcaacagtgtcggtaaaggtttcggtgctagtaagactagctggaagaacaacatctggggtgactccaacctaggagggttcggagatggtgagtaattcgtacaccaattgcgacttgggctgtgctgacaaattttgcagaacaacacctcggcgagactgcattcgaaggaaaatctggatctggttcccttctctctacatcagagtcagacggctggtcgggacgtgccaacctgccttggagcactgtcaacaccaacccctccttccagaatagaggccttgccacatcccccacccagattcgtgcaaatgaccgcagtgctcctgctctcaacgaagctagtgatggctcttacttcgctctacctcgcaccactgggaccgcgagccagcgcccctacctcaacactagttcggagggtgtatctccatccggagaaggcctcaccttcggaggatttactggtcgacgacagatgaactcaaccggtctcggtggtagccctgtgggagcgactttccctgtgaagcctggattctcgaaccctctcgatgctggaagcggagatggaatgggtacttcaatgggcatgccatcgttgggatctggaattgccgagcacatctctccaacacagggccgcagcggcctatcacacgcgtctcacaactccgcctcttacactactcaacgacccactcactcagctcatccttccttctactccgacaatcacagcatcgatggccgctacagcggtggctccatggacctcaacgccagctttaacaagctacagctcaacgaagctaactatgcctcccaaggggcccagcgaccctcgtttattccccatgcttcctttgatggctccttcccgcgcggaaagtatcagaacaacgaagacacttaccaggcactgggatacaccgcagaggctgcgcaggagatgcaccttgcttaccaggcacgaaccagagctgcgaacaccggctccatctcaccctccgactatgcccgcatggatagccccatctatcccggcgtggacgggggtgctcagtatcgcaatgcagctccgagtgaaagccaagtggcagcctttgagcgcagactccgaaacttccaggagcaggagcttgcccaaggttcctcgcgattgcagtaccctccttctttcgacttccaagcataccaggcttctcgcatgaatgcaatctctggattctacccagtaggtcatcttagtggcctcggtgccgctgctctggtctcacgcactcaacgcgagcacgatcctacccaggttgtgcgcagccctctcctagaagagttcagggccaatagcaagggcaacaagcgctacgagttgaaggacatctacaaccatgtggtcgagttcagtggtgaccagcacggctctcgcttcattcaacagaagcttgagaccgcgaacagtgacgagaaggagcaggtgttccgggagatccagcccaactgccttcagttgatgaccgatgtcttcggcaactacgtcgtgcagaaattgttcgagcatggaaaccagactcagaagaagattttggccaaccagatgcgcggccatgttctggccctgtcgactcagatgtatggatgccgagtggtccagaaggccctggaacacatcctcactgaccagcaagctgtgatggtcaaggaactggagaaccatgtcctcaagtgtgttcgtgatcagaacggcaaccatgtcatccagaaggccattgagcgtgtcccttcggagcatgtccagttcatcatcaatgcgttccgcggtcaggtcaacagactggctgcccatccttatggctgccgtgtcattcagagaatgcttgagcactgccaggaggtcgaccgccagtccattctggccgagcttcatgcctgcacttccaatctgatccctgatcagttcggcaactatgtcatccagcatgttatcgagaacggcgacgagaaggaccgtactcgcatgattgacatcgttatgggacagctcctggcgtactccaagcacaagtttgctagcaacgtggttgagaagagcattgagttcggtgcagaacatgagcgtatccacatcatcagtactctcacctcttcgaacgaccgcggcgagagccctctccttggtctcatgcgtgaccagtatggcaattatgtcatccgtaagttcaataccatcattttttgcgtgctatgctaacccccaacagaaaaagtcttgggccaattgaaggatgccgaacgtgaagctctcatcgaccagatcaagccccttctcagccagctcaagaagttcagctatggaaagcagattgtcgcgatcgagaagctcatttttgaccccaactctcctgcgaccgtccctctgtctcaccccacctctaccactcctccccactcccacaaatcctccccgcaacccgccaagcgctcaatcccgactactgagcagccccgggcgcctttcatgggcaacgctccacctactcctcccccgacggatgctcagaccaccgtcgatactaccctcgagtcgaagggcctcgccaagagcacggtgacctcggtttcgagtcccgagacaggcaacaccggtgttaccgtcccggtcgatgtcaccagtgctcattaattcgctgcacactttatcttgctcgcccaacataatctttctaatgctgatttgatctgagccgagtgacttcttgttctatctaatacggggcgtatacatacaggggaatcaggcgggatatatgttaccaacgtctatgtgattctcccctttgaccatgctttgacggcgcaacaatgagggcctggaatgtctttatttctttctttttctttcttgtgttgatctcgacctcgatctcggaccgccgacttatttcttatcttactttatttgttcttgtttctttcttgacatgttcatttattcttatgattgtctttgtgaatcattgtcaattcttcttgctacgaaatccaggtccggcaatcgatatggctccggcgtctatgttctttccacttcttccatttttatcttgttacggggttaaggcggctgtgatgggggaaaaccggcaacggaaatgggaacgatctttcgctcttcatgtcttccgaccgcatatgccatagcatggagtctggaccatccatattcacattcgggtccagcagaaaataccacgaaaagaatcaaatcaaccactttgcacatcagctaccttgtccatggcatctgcatgatctactcagagccacttgttactatttcttcactggccgagcaacatatttagtcatggccatgattctcaattacgagatccgcgactttcctttccgtatcaaggtgttcttatcaaaggcgtttctacgcttctcggtcagcatggaccattctgcttggctttgggggcttgtcataactcccagctcttgtggatttcatgcttgttttcgggttgccctgttgagaatttctctcgtggttttcttttcttcctcttgctagtggctgtgtatcatcaatgcattatgacttgacttttaaattgcttcagtatcattgagaatgattcgtaccaattcgctcatgcatcgtagcatcctagcatttagtacaagcccgaatgtgaagtattgtggtacgtagtggccactcggaactcgatcgttctaaaaggtattctaaagtgtattctagtacatttaaacagaacctaaaaccgagtcactgtgcactgcgatagttgacctatacagaaccatatcacacgtgactcccgtcccgtgatgcccgataagacgatgcattttgatagagttggagcaaaccctcaacatttccagtgaccagcattgtttttctgcgcgtcatcggatgaaaccttcagcaccaaccaatccacccatcattgctgaaatccgaatccgagctcgaaagaacctccatccagagtcggcatctagaccagctccaagctctcatccattccgcaaaaccataactacaaacctccaacaataatcaccaccacaaaagccacacacaatcacctaccgaagaatccaaatctcctacttaaactccactacttattctcccaacccaccaatcaccaccacaaaatgtcctccaacgtcggcctcacaaccccgcgcggcagcggcacatcaggctacgtgcagcgcaacacagccctcctcaaaccccgcaacaacggctacggcgccccatacccgcccatcagcggcgcaaacggcagcgggcccatggaccgaccgttcaagcagcgcgtaccggacaagcagatcctggagcacgaccgcaagcgcgcgatcgaggtgaaggtgatggaagagcgggagcgactggaagaggagaacgagcggattgaagaggaggcgggggataagaagaagaaggggaagggtgggcatgatggcgagggggagaaggagaaggagaaggttcttactgaagaggagattgatgagcgatgtgatacgcttcggcagcggttgctgaaggagcttgaggaggacttgaagcgtgcggagtcgggcttcaagaagcctttctctggctctggggctggggctggtagggacaggcgcaattttaagtcttatcaggttcatgagcttgctgaggcgaagattgaggagacggagaggttgcgcaaggcttttgggttgagggaggatcgggagactggggagatttcgagttctcgtgattatcgggagaagaggagggattagatttgttcttttctctgcttggttctgcggtttgcgtttttttcttctcaagtaatggttggtgttgatcggtgttagggttatgggattatcatggaaatagggttgcatgaacaagtttctttctttttattgttgtccatgttatgctgtacaatcttcgaatgcaaagaattgaacaattggatatcataacctcatatataatacaccaaaccagtacctatgccacaaacttttcaataacccaaccctccttcgggtccttcttctgcacaaccttcttagcaggcatcggccaccccacactccccgaatcacccaccaaagcaggaataacccagcaagatctgcgcggcggcacaccgtcaatagcatcagccttaccaatcggctttccatactcaataagcggcgtaccatgcgcaatcgccgagagctgcaagccactgggcgcaacaagcgggaacattctaatcttaggaacctggtcagagaccagtgaagcagaagactgctgcagatgcgagtaagtgatatactgtggcatttccttcggcgagagcttagctagcagcgaagacggatgcacatagacagcgcgttcctccaggtcctggcccttaccgtcgcgggagcggaagagcgtcaggtaagggacgtctatggcgcgacggggcgcacgcgggttctccggcgggacgggggcgagatcagcgcggatagcgacatggtcgatgaagcctgctgtgacgatctgcttgagggccttgatttgctttggtgagggctctggcagacgggcttcgtaggcggggacgacgcctgggttgtttgagcgcacgatgtcggttagctggcggcggagctgggttgcttctttgaaggcctttgagcggaggaacattttttcgcagaaggcgtcgccgtcggaggcgtagccgtaggcgcagattgctgagagggattttagcgcgtctgaggtgtcgtcgtgtttgctgaagaggcgttgggcgcgggcgtatgctttggtgcgctgttcgcgctcgtcgtcttcgagacgatctgcgtttgtgtagaccttgcgtctgtcgctgtcgctgtcactgtcgtcgttgactggcttcttggctgtggtgggaagggggttgttggggtcgagctgattctcttggacgaagaggtcgccgactgctagggctgcgactagggcgatcacgtagggcatgcagccgtgttggtggccgatgtggagcattttgctgaatcggggagagagggggtatgtcgagagacgacggccgatgggcgttacctggccgtcggctgtgagggccccgaggttcttcagcagtttctctgcctttgcgagaccttggcggctcggtggtgtggggaatgggaaattgatcacgttgtgaagacccatgcttttcatctggaggacaacgccttcgatgggcgtgcggagaatctctggctcggtgtattcagcgaactcgctttcatagaccgcagatgagtacattcggtaacagtggccaggccctgttcgaccggctcgaccggctcgctggcttgcgcttgccttgctgatccagccgacctggaaactttgcactccagtgaagagatcgaactgcttctccttggcgcgaccgcagtcaaagacatacttgataccggggatggtaagagatgtctcggcgacgttggttgcgaggatgatcagccgggagttctctgggggcggctcgaataccttcatctgctccttcgtgggaagttgggagtatagaggcaaaacgtgaacgcgagttgacgagtccatggcctcttcgccttcggcaagttcgaagccttcgtcttcctctgcgtcatccagtccggtgatctccatgtcactgtcgtaatcgtcatgtccaggattatccatctcggtgccgcccagctcaaggtcctctgcttccagaggtgcttcagtagctgagagttgcacctttgcctgtgtcgtgtcttcccgctgagtaggtttgaacgcctgcttcagccgcttagaaagctgccggatttcgttctgaccagtcagaaagacaagcattccaccggcaggtagtttgcggtgtccacgcgagaccttgcggaacgcatcctcaacataatcacgctgggtgcggcgggagaaatgaaccgcaacagggtattggcgaccctcggcttgaaccaaggggggtgcaccattgcggaaaagacttgggttttcagtgaaatccgaaatacggagagtggctgacatgatgacgaccttcaaaggcttgacagacgggtcctcctcgctcaaagacttgcgcaggcccacaatacggctgaccattccaatcaggatatcagtgttgacgctgcgctcgtgagcctcatcaataagaatgatagagtatttgcgaagggcaaagtcatctgcaatctcccgtagaagaataccatcagtcatgaacttgatggctgtcttcttcgatgccgtagactcgaatcggatttgataagacactttctcgccatgttgacccaattcctgggcaacgcggttcgccatactcacggctgcgactcggcgaggctgggtgacaccaattagacccggattagggctgtctggggagccgaagccagattcgaaaaggaactggggaagctgtgtggtctttccactaccagtagcaccccaaatgacgacaaccgagttgttgtgaattgcctccataatcttttgttcttcgccaacaacggggagtcctagacgggcggtttggatttcctccgtgcggttgaccgcgacactgtatgccttccgattaggatcgccatgagttacctgaagctcccgagggaggggttcttcttgggtagtattgtgggttgctggcaacttagatgggtcaaacacctgcacttcctcggtcacggctccctcgttgggtttgaagcctgcggcttcgttgatttgttgtaccgcccaagatttaaaggctgactggcgagtcttgagcgttggcttatccacctcgtcatcattttctgagtcttctgagtcttctgagtcttctgagtcttcatcctcatcctcatcctcagaaatgccctcggaggacgaagtatcttcctcttcagaaccctcttcaatatcactttcggactcgtccatatcgtcctcatcttcgtcttcatcctcctcacccgaatcaaagccctcccatgcgacctcagcttttaccggtgcaggtgcgggtttcttcttcggtgcgcgcttccgcttctttagaacagggaatccatcagctcctagctctaatggtcgtttaagtccacttccagcagcagcctcttctcgtaatttttgttcattgggatctgttgcgggatcggaaactttcaggtggatgtccgaatcgtcggagtcatatcctgagatatctgcggaagcattgtgtttcggcgcggatacggctcgcgatgtagatacgtcgtcatcctgtctcttgcgcttgtggagatctttggaactctgtaaagccgaagtgtccacagacgattgagcaagtttcttcaacaattcgatattttcttccttcctgagtttgttttcctgcaggtatgttagagccatatctttctattccaggccatccacatacaatatatttgtccaagcgcttctgcttctttgaggacatctgaggatgctgctcttgtagctctcccttcagcttctgtcgccgtgcctctttctcatccttcgaaacgggctggagctgtgcgacattggtatcagccgactcgccgtctgggttttgccggtgcctttgttttctaagacgtggtgtaaatttaggtggcatcttggggtactgcagccactccggctgagaaaaaaaagtaaattgactaagtatgtaagctctgcgatccaactatctcttcatcgaaaaaaaattagggcggtcggatattgctggttcggaccgaggcggtgaaactagccaccgcctacgagatacacctagttaagcccctcattctttagtttctcttcagtatttcgataaagataaataattcaaatcaccatggctggatcttttgatacaagctctctgcaggattccctcaacctgccatttcctgctaccactaagcaggtggcggggttagtcaatggtgtacaaacagatgtgatgataatgagctttagcgataaaatcatggtcacaatttcacaagcaggacgactagcgcactgggtatgtcttgcccttgctttcagaaaacatcgctaattgtatatagttgcatgtaccaatggagaatcagaacccaggcactgagggcatgcacactctcgctgagggcgatgatgctctgttgccccttaaaagtctaaccaccaccactttattaggtggctattctcctggacaagatacgacgggccaactacttgctcgtcagattgctacagctattgcaatgaaaacacctagtgaaaagagactactcctcgttggccttggacttggcaaatcaactgctgatagagattcattcttcgctattgttgacctggttctgcaatgtctatgaactgagcatagatcgatctctgactgagaacaaagcagccctcagaacgaggcatgcgccagacgtcgggcgcgcttcagaaactgttccaggccctcatttgtgatctctccgtgaattcgaatgcgctcaacttcaatgaatgcgccgcacatcaacaagtccgccaggtcgacctcattcatctggcccccagctgtccagttcttcctcaattcgacgatcagcgtgcggacggcgaggaatccatcagttttatgccgggtgatgaacttcagaaattggcgagtgcgcttctcggctttctcggggtcgttgtcaccaagcgcgattttgattgctcgacaccggactgtcgacaggtgtcgcaacactgggcaaggtgggtcaaggtacgcgtatctggcgaaatccatcaacaccagagtccgattgctcagcgcattgatccatgcgaaccacgcctctgacatccagttgtacgatacaaatcgcatgcaagtcggaatctttgggaccatcccatccttcttgagaaagacgggctcctggcagtcgtcgaaagcgtacttccaaatctttgcgcgaatctccagcggcagccaattgaatgggcacgggctccgtctatccacgatcacctccgggggaaatattctcatgtcggcgaggaaccttttctcgaatgattcccactttgcgccaaacagcaaccagacccttcccttgaacttatcatcggcacgacgggtgatgaagaaaagtggtgtatcggaactagtactttgttagatcaaatggacttggtggcatcgtgcccatagaattgtatcgcttactatgcatacggcatcctctttggtctcgggactacctccacttggtcagactgatgcagaaccgccgaagccgctggacgtggggcttttgaaaccggggcctttgaagctcgaacctttgaaactcgaagcattgaaatcgggaccttcgaaatagggaccttcgacagtggggcctcgaaaactggagtctccgaagcggaggcctccgagaccgggacctctgaagcttgaatctctgaagccgggacttgcgaagccggggccttcaaagctggggtctccgaagctggggtctcaggaaccgggtcctctgaagcttgaacctttgaagccgggacctccaaagctggggcctctaaagctagagcccccgaagttggggcatccgaagatatcgctttgtcagaatcgcgcttggccgaaatccttcctcggatacgctcacgcacggccgaaacctttccttggatgcgctcacgggtgcccgaagcacccgcttggatgcgacgaacagttttcttcattctgttcactaagtggtggccatgcgtgatgaaggagtgagatgtgacaaaggagtgagatgggataaagaagcaagatgagataaaggagcgagatgggatgagagtgagatgggatgaaggagcgtgaggggaaggatcctgatgggatggtgtcgccggcgacccaacgaggcacacgctcggcgcttcccccactactatcgtcatgtctgcctgcatcttatgacttgagtgtttatagacgccatgactgctttgatttagagaactcctagtggtcaattacccgtatatacttgttcggagttaggtctatttcggtattattctgtgaatcggaattgtttaaggctatctatcaagagtgatcatcatacaccggtctaaaaacgtagaagatgatggcattttgaatatcaaatcagttttcttcctatgaagtgattgtaggctatgactagcagagatacatttgatattacggtatggccagtcacgtggtagatattgacaaacaggggagacgacatctgtaggtccgacgtgaacagatgagttttggggctggcacaatcataatcccctagtcatctaaaccttcgtctgctggttttgatattccttttagtgtatacattctgcatcctcacatttgaaggtcttcttagatttcatactccacacatcaaacattctatttttatctgccgcccgcatcatttgaatcctttatcttcatctatttcttttcaaaatcctgcgtttcggtgtctgtaaagttctgcataatggagccacaagtggatcctgagttaaccgctgccatcgaggcctctcgccaagatatgtatcgccagcagaacaggcgagcgtcccaggataattttgtggatctcaccaatgactcaggtgatgactcggacattgaggaggtattccccaaatcaaagtctgtcgttagttccgagaccgaagatggcgaagagcacgagcagctgcaacgcgcccttgctatgtcgatggagcaggatgcacaatctcccaaacatgctactgccccgcatgaggtctctgcagcgtcgacgggttcaattttgggcatgaaccgaaagcagatggaggaggagcgtcttgcacgtctggccaagcgcaagaccgacaactctttgtctgagagcaaggttgatgatactacgtctaaacgtaaggccaatgacacttcatctaagcgcaaggccgacgatacttcgtcgactccgccatctccagttagccggaagcttcctaggactgagcctttgccagcccgtcactctgtcgctctagccaacccgtttcaagatgctccccaggcaagcacggctcgagtgagatctcaagtctgtcgccagcttgcaacaaatgccccgaatgttgacatccaaccgacctcctgctcagtggcccaatggcctcttggagctgtcaaaaaaacacatatcgccggcttccctcgcagtggaaatgacattacaattgaagaagttattcagcgaggagacttggagttgggcgtatttagctcatttatgtgggacattccgtggctttgttccaagtttaacaatttaaccacacgaatcatctttgtcatgcaagcaaatgacgaagaaacggttagcaacacactatgatcttgaatgatacgggctaacgtgacttcgcttacagcgagagcaataccgccaggacgttagccacatgcccaattttcgcctgtgtttcccgccaatggagccacaggtaatctgtatgcattctaaactgcttctgatgtttcaccctggatatcttcgcatcgcagtcccctccgccaatctcactcccactgactggggagaggataggctcatggaaaacgtatgtggctacattcgcctgatgttcatggattttctaacagtgtgcagactgttttccttattgatctgcctaagctcgaagttcctggtgctggaaagaccccattctacaaagaactagtctacttcctccaggccgaggaactccaccgcaacatcatcaagaggctagatgagtttgacttcagcgagacgaagcgctatgcctttgttcatgcagtgtatgtattatctccctgggtgattcccctggcaaaaaccagcaaccagctaacaatctaagtggcggaacaagcaccgaagacaactggaaacgtactggagttagcggtttgggtcgtgctgtcaaagctctcggcctggagacaaacgcgcccattaacgtcgactatatcgtaagttttacctgctatgccttcatataatacaatactgggtatactaacaacattcaggcctcatcgctgggaaatatcaacattccattcctgcgctccatctacctcgcttgcaaaggtatgtcaccatttagtaaagcccagacgaactaatccaactaactgcaaactgctaggtgacaacgctctactagagtacgagctccgaaccgcaaacaagaaaaaggaaccccgtacagaagtggaagcgattaaccgagaatgtctcgaccacttccgtatctacttcccatcagaccagaccgttcgagccgtgcacagcaatcccaaatactctatcggcacgatatgtctcaatccagcctggtggtcgggtgccaatttcccgcgggacaaagttcgagactgtgtgagcgagcgcggagtcttgatgcataacaaggtgagtacttccgcggtgccagactagtatatcgattttttactaatacacaatccttccgacatatagattgcctttgtccacccttccaccccgatcgatatgcccgataataaggagtgccgggggtgggcttatgtggggagtgcgaatttgtcagagagtgcatggtgcgtacatatctatactccactcgctgtaatgacaaaactaacatgaaccaggggtcgtatcgtcaaggataccaagacgaaacagctgaagataagctgtcgcaactgggaatgcggtgttatcgtgcccatcatcaatgagaagaagactggggagaaagataagggaccggaaacgcatggaaccgccccttcggcttctctcccagtcgagatctttacggataccgttccagttccgattaaagtgcccgctgtcccattgtccgagcacaggaagcctttcttctttggagtttgattcaacctgggatcttgagattgcctttgtttactctacatctgagtcagatcgatgtctacatctgcaagtccagtgagaatctgattttactaatcttggcatgggtatctgggataggagttcggatcgggttacttggttggttcaatgaaacgaatgaatggcaagggagttgaaagctgtatgtattatctagcctttatgctgtgatattcaacgagagcaaacgagagaaacagtgaatgtcctaaaaagcaaagttgtatgattcaatctatgtaatatgtatgtttctaacccaacctgttccgatatatctattatgacgctctatgtaaatgcatggtgacaaaaagaaaagtaaacaaaagaacaatttccaaacttttcaagcctagttctcactcttcttccccttgaacaaccccgtcacgcgatcagtcatcagtccagcaaaaccaaacagcgaagcaagaccaaagctccagcctttcacacgaacggtgtagataaagaaataaaccaaagcccagttaataataacataagcaaggaaaatgccaaagcagcgccacttatccccgatatgaacattcaagttggccatatactgcgcaccatccttgtagggacagtactgacagtcggccgtagcctgggggttaaccagatacccgaccttagcgaaagaatcgacaaagtcacccgcataagcatcacaggtctgtccaggaggggggttgaaatgggtagattccagcgaggcgcagtcaatctggacatctggcagaacagccgagagcacgccgcgcagccaccaggtaaccgggttgacgtagtacatccagtatttccagaagacggggtaagcggcgtagggacggacgataccgttgaagaggttgatcattgtgaagaagaaggggagggtgtttgagatgacggtgaaggagggcgcgaaggcgcagatccactggccccacgatgcctggaagaggaagaaaagcatggtcatgaggaagacgtagccggcgtttgaggagtcggtggggaatccgacggggtagtaccagagcagccagtagatcaggccggagatgatggctgcggggatctcgcagatgatgtttgcggtgcagaaggcgacccagccgtagatgcgggatgggtattcgcgtgcttcccagagggcgcggttgatgtagaatttggggacgatggagttgaggacgatgggcgggatgaggacgattaggaagacggagaacatgcggtcttgcattgaggctacggtgttggagagcatgtagaaggtgaagccgttgaagatgccgatgatgatggagacgaagagtttaccgtagtagtaggaggggtcgcgccagtagttcacgaagaggcgtttcgtgagctgggtggtttgggtcattgttgtggcggcgaattcgtaatgggcggaggcggattcctcgatggggagtttgctgcgctcggtgcggatgtgttcgatttcggcgagcacttcttggttttgctccgagttgcgccattcttcgttccagtcgactagttttccgtcgcggtgggttgctttggcggcggtttcgaggatgaactcggcaacgttctttgatggtgggcagacgaagccgcggtcaccgaagtacttgattatggaggagccgtctttgccgacgggaccgaaatagaaggtgttgccgccggggttgagggcgaggatcatgtcgaattgttggatgatcatggaggagggctggtggattgtgcagacgatggcctggccggcttggcaaagtttcttgaggaagcggacgatggagaatgcggcttgactgtcgagaccggaggtgggctcgtctaggaacagaagcagactaggcttggctgcgagctcgacaccaatggtcacgcgcttcttctgctcgacattgagacaaccgataatggcgtcctggatatcctcgagttcgagaagctcgatgatgcggtccacgtagtccattttctcctggcgcgggacatcgcggggctggcggagaatggctgagaactcaaaggcttcgcggatggtggaagtattgtcgtgtagatccatttgctcgcagaaacccgtgccacgctggaaatcagcacccagcttgtggccatcgacaagcatatcaccagtcacgacacccgtcttctggcgctgggccaaagtattgaggagagtcgtctttccagcaccagaggcacccatcagggcgatcataatgccgggcttggcgtaaccgttgacaccgttgaggagcttgcgtgttccgttgccgtaggggacagtgtattcaacattctgccaggtgaagcagcgctcacttgaggacagtcggttgaaagtggcaccatcatcaggagaggtctggccacgggcaagagcagcgttgtcttttgcgttgacgaccttctcttcatcgttgacggtgctggtctgggcagtgactttcttagcgcgcttggactttttgaagaccagagcaccgcccgcatctccaccaaatgagagagtctcggcagcgatgacagtcaccaggaggtacagtacggtgaaggcaatgacaacaccaaagttacgccatagatggctgcgtgtgaactcaaagttggcggtcaagtactgagctccggtaacagatgattcacccaattccgaacccgtcagagcacagccctggtggttggaatccaccccaggaccctgtgggacaagctgggatggattgcattgcatggtgcgatcggagaattcgtttgtcaagactgcctcgtaactgtacgcgatggggttgacatagaacagccatccgaaccagatcgagtccttgatcagagtctgcttgggaatgacataaccgacgaagataatgagcaggttcagcgcgataccaccgaaacgcaccgcgtcatcgatggtcggagacagcgcagcgaacatgcggtacatggaagtgatgcagaaggtattcgtgtacacgaacaggaagtagatgaagaacttggaagccgagacatcgagaccagtcatgaaatagacgataatcgtgaacgggacgaccatggagaagataaaagggaagtcgacaatgacgcgggcaatggagacagcagaggggcggtagaaagcgtaatccttgtggcgggcgacgataccacgtccagtgacagcaggcatcagctcggtcagttgcatccagccaaggaacagaatcgagaagaacagagcaccgctacgcgagaaagcgccgctggtatccagggactctccgtagaacaaggacgaaacgatgaggccgttagagacaacaatgaagtacttcgtgcacagagaagttttatcgccccagagcagccagaactgtcgctgcacgcaggccgtgacctggcgcacgaacgagacggtgtatggcgacttcttggagacagacttggacttggactgtgcgaccgtggattggaagcggcgggtgtcctcctgcccggtgtcttggagacgtttctcgtacccggagacatcctccaggatacggctgtaggtctggctgttcctgaaggtgttctcgagttcctcggcggtcttcggggtggacgcttcacggccaggctggaactcgcgggcattgggatcgcagagcgaagtaaggaagtcggccgtagtccattgcgcggggcagtgaaagcccaagtcgacgaagtattgtcgtgcttcattggctggtccttggtagagcatgcggccctcgtcaatgactagcaccttgtccatgagctcgtaaatgccctctccggcttggtatagcgtgacgaaggtagtgcgcttgctgacatcggtcatgatgcggagggacttggcgtagtccagtgcggtgctggcatccagaccgcgagtcgagttatcccagcagaccactgaggacttggtggctagggtctctgcgatactcacacgcttgcgctcacctccagagacaccgcgtacatactcgtttccaacaagtgtattcctggtgtgagtgataccgaacatcttcagcagggcatcgatgataatgggaatgctttcccggtcctgcttgcgggttttgttgataagggagaacttgagagtttgccagacagtgagcgaggggaagtgctggtcgtcttccgggttgtagttgacttctccacggaaatgcttgtgctgatcctcggacgagagaccaccataactaacctcgccatggaccccagcaaaagcaccacggtcgttcgcaatcgccttgaggaaggtagtgcaaccagcaccgggacggcctagcaccagcatcatctcaccttcacgcacagtaccgctgaaatcatggattagatcgcgaacaggagggtgcttgccgaaccgcagctgcggcacgaacttgcagacgagattgtacagatccgggccgaaggtgccaattacagcctgggggagagtgcgcacgaaggatgcgccagtctccacgccttgcacggtaaggttcttgaagacgacgccaaccttcttggcgggttcaccggcggtcgtgcggcgctccagatgaccaccaatcaggaagtcactcaggttgaagccgccgtcagcctcgtcctcggtctcctcttcgtccttgcccttttcttcatcgaggcggctggtctgcgattttgggtggcgaatgctcctggtgacagagcgggtgcggttcaggctgagacgggtgagctcgcggcgcatctcttccatgtcctccatcgcaccgctgcgggagacggcattcccggcattctgctctccccagccgccatcttcgtcacttattgacgagctgaatgttgagctgtcggttaaagttgggtcgatgggagcttcggtgtgaaggtgttccgtgggttgtgactctgcatcatggtgataggtctcaccggttgagctggattgttgtctggagggctgagtataggcttgggaatccgaggcgccatacgactgttcagaatggccctccatgtcgggaactgggtggcttctactctccggcaacattcaataacagatgtattatgctatagccaggctaattaaggacaggatatgcacagaaccaagggggaagtaaacgtaaagtaaaaggggcagagttggaagggaaatattcagaagagcaaagagactgcacaccgtttatataaatgtcatagccctagggcatttgtcagtcaggaatacgaatcattccaggacccttggaataactcaaacctcaggtcgaatcataagccagacaatgagtcctgactgaagagctatagtgggctatagtggagtggtggagtgtacatgactcaagttgactaaagttgacggtaaagaattttatttcaagcttccccggagataagccttagctccgtattgagccgatccgggctggtgattggctgtttccggctgctcatggacgttcattggctgttcgacgtgtcattgggcggaatatccattcctatcagtctaggcttatcacgtggagccggcttttatattccgtttcgtctcttttggtttcttatacaccgttataggaggatggattagcaatcgtgcttacgaatctgtttcgtagggataatccgtgtaacctccgtgtaaaaaccatgtaagaaccatgtaagaaccatgtaagaacccccagatatagaacaaagaattggatatcaaaccgggcttgtatattgccgatgtaattcggcgactttccaagatttcattgacccactcggctgaaagcatattccgactaatctgacttcatgtctgatctaaataatatatatggtcttggcttttatattgttgagagttccatcaggttctttttaacatatccttggtagcatcttacacaattgcctttttcaaaaagaaaccctaaatcccaaccttcacacttaacttgcgtccaggggtccccgataagctattatcaaccatgcacctccacgttgctatatcacatgtagacctgcaggctacacctacttttgggcatccatgttgtttatgtatatcgcactccatagaaacctatagaaatgcacgtgcatggtactactacgcgcaatccccactagaagatacggtctggctcgagcaaaagtccaacattggaatactatacaataacttctaacccctacttattttgatcgctacttacgcttagcagcagcttgagcgatccgcttctggatctcttcctttgagaggatcttcacggcgttgttggagaagacatagctgagtccagaccaaagagtggtgccggcaacaaggtacctaaaattggttagcaaaaagaaacaattcaaaagaaaccgcaagtaagaaaaaaaagaaaaaaaaaaaacatacaacagtgaggattcgctggtggtcacccacccaactactaactcaccggcgnnnnnnnnnnnnnnnnnnnnnnnnnnnnnnnnnnnnnnnnnnnnnnnnnnnnnnnnnnnnnnnnnnnnnnnnnnnnnnnnnnnnnnnnnnnnnnnnnnnnnnnnnnnnnnnnnnnnnnnnnnnnnnnnnnnnnnnnnnnnnnnnnnnnnnnnnnnnnnnnnnnnnnnnnnnnnnnnnnnnnnnnnnnnnnnnngcttaagtacggctgagcggacgggaagccctgttttccacaccctatggtcgtatgtaccagaaacagcctcgatgtgtcttaggatggaccatcgaagactgctcccatacacaaaaagaaaaaagacaaaaaagacaaaacaagggtataaaagaaaatatcaaacttactggaatccagtcatagcctcgctcaaatgccacgcactcacaaacgcctcggggaccacaggcagcgcaatcgcactacccaccaacaccagctgtagggcagtattgatcttcgaaatctcagtgggcttgacttccgccgagggaagtgagaaatcccagtaccgggccatggtcttgggctcaggcagcgaaatccaacggtaatagatagccgaaatagccagacccagatcgcgaccgaggatgatcacagcgagccagactgttcgatacgtcaatccatgtccatgtccagataccaaagatcaacacgagtgacttactaggaagagagccattcacggccagacacgcgacaccaatggtcatcaacagcttatcggccatgggatcaatgatcgttccaaccacagtttggaggttataccgccgggcgatgtacccatcgacgagatcggtgatgcccgcgtaggcgaacagggataacgctgctgtgtggtagttgtggactaggagatacccgaccacgggcgcggccagcagccgggagaatgtgagaatgttgggcacagtgtagatattctcgtgggaggttggcaggggaatccgtgatagaataggttttttcttggatccctcgggtctaagctaggttagtcgttggttcgaatggcttatgtcgatttgtatattgaatacatagtttggagtagacctactgttcaggagatttggctgattttgacccggaccatctttgctgggtgaagaatgatggtgcaatcagggttgtctgaagacaacgaggtttcaatctgatgaataattagaatgatataaatgaagaagtcacatacgaccatacctaggtgatcggttcaatgttgactggactgatgtagatatacatcggaatccatctctccgaagagattcagttttgaacacatttgactggacaagaagacgtgcatttttggacagcacttgggatccctgccggctcgcccgaagggacaactgggctgcgtatgagccaatcatggtgacaccaatataaggtgacagcggcaggtgttgttagaaaacaaaaattgacagcgacacgataatcacaagctttcaactagcaatttcagctgtgcatacccggtcgtgttcaggctatgcaatggtgattcggtgcaagtgatagaaagctgtcgccttgcacagttgctggtaaagttgcaaattcaaccccacaccaaattaaaccaagtatcaagctgatagcgcaaggaatgcaaataaacagacacaatgctatatagtacaaacacaatctagggattgttagctggatgtgtcggaattcggggcaacttggctgagcgggacatacatataacagaactccaaatgcagatcagttctaccagtaaatcaacgagctagaaccaagagctctagatcacggtcgcctgatgttagatgaactttggagattgcacctcggcgatgagtttctggccggataaatggtttctccgcccgtctctatatcgcaacttatccttcctgtgggcgtactttttctacattcatctatagaaagaaatatgacaatggatttggctgttaaatcatatcctaaactgatagtatcatctattggttcccgatgccaggagccgcgtcaggggatcatgatcaagcctctgctcacctgatatctgtacctgtgacctagaaccccaggtgatgaaagacacattgaacaaaatgacgacttatgtctaagcagtcagtaaaagaatatatatgttaatctcccacacagatgaattcaaattctcgcatctacgtctagaagaagccttagagccagatggacaagcaagcctgccagaacaaagctgcggtcttatctttgcgtcgccacgatgtcacttacttctgcccaaactgggtgtgtctcggactcacgctcattaactccaatctacagtgtaccatcagccaaagaaaaggaacaatcagatccaaatatggcgaatccacgtcttcttatcaaccgtgccctcatctacgagcgccgactacctggtgatgcttatatcaccgcgaatgtccagcgcctccagcatggatattactccagtgatgccgtatcagatggggacgctgaacacgtagattttctcgctattgcattcaccttccattcgccccacactatcgcgcatcgcatcaagtccgccactatcagtgtttcagttcgtggaagccgtgatctttcaagttcaaagttgtacccttttggatatccacccggtaacccacgcttccttatgcatgcgccacatctgctctacggcagtgtttctccagagaccatggagtggacattcagtctggctgggtccctcggaatttcagaacttcccgtcagcgcaagcgtcattccctcggggagcttcaatggtcggtacaagcggtacgagatgatgcgcatccaaggctccgcacgtacgttaaaaagcccatctggcagcgatttcgacgtcgaagctggcaggatcgtttggtccatggaagagaacaatgtccagcgatccggtctgccgcgcgagttcacctttgtcatgttgattcagaaacccacagcaaaaagcaagatttccctgtcgattgacgtcgacccggtcatcgacgcgatgattggcagctacccatcattgctgctgaaactgcctgaataccaacctttgccgcgccggggcgtcaatttccaacaagaagttggacagcggtttgaacctgtggacccggtgcgcgggttcaactttgcagacctcgggagcatgtttgatgagtacatcgccatgccaggaaggaagttcagccgtcaggtatgttcagcaaataaataaaatgaaaccctcaatgcatatgaagtgagccgaaactaataggtacttctctcagatccaaatcccatctgagaccagcatctctgagaatcaccagggcacctacccaggccagcaagggtctctaaacctaatcccgtaccaacaacaactgcagaaccacaacctggccctgcagagcaataacctcactttgcagaaccacctcttacggacaacccttagaaccctctggactacccagccgagggaagaaacccaatacttcccactcacttcccacgctcatccaacaccaacaccaacaccaacaacctccaccaccccccgagcagctgccatcacaatacctctcaacctgcatctccacatcgaccccgccacaacacacctcaccaacctggcgcggacaagcccaggtccctcccccctaggcccgcgccgcacaccaagcctacggcgcacgcaagcgcgggaattcccaaaggctcctctccacacctaacagagtcgatgatcccacacaggtgcagcagcggcgccgcactctttcatcttgcctcaagggacataggctgtgtgcctaatggatgtatttatatatgactaagcacgtgagcttctttcgtgaccaagaagcaaagaagtcacggtttacttatatatggatgagatcacactggaatatgggggtcgcctaaacctatcgacgctacgatctataactaggaagacttccgcctcagagagagaggtccggaagaagcgcatggaaacaaaaacaaatgactacgccacacctctctttaaagacgctgattttagcgagtggtcggatattcaagaaagtcgactgaggatcgtcccacaactattcagcgctatgaattgtctgcagtatcttccgttttgccattacaatatcatatcaccgagcagactgcagacgagaactccccactcttctggaaattctcgttctatgtggacgtcctatgcacggtacatcatgggattccaccctaggagcgggaataaattcagacaaatcatggaccaacccaacgatatcacggaaacctgggatgctaaaaaaaaccaacgccatatacaaggacagccggaccggccttgtaaatacggccgacgcacgatggagcgccatctgggacagaccaaacggacaacaacacgttaattagcactttagccagatagaagaggtgatacaatatagcatttccgaacatcggtatcacctacactcttctgttgtaacttgttccccattacactactttcgaggatttctcagcctcacttgttttggtgatgctatataagtcaccggattattgtattagcaggttaaatgtttactacctataaagcgagaagctgcaacctgagtgccccacgtcaaccttcctatccctcatatggctttcttggttggcactcctactgtggccctgtgaagatcaattccgacgagtcagatagatcgcttttagtaaatgcgttcgacttgcgagctcctaaagcacaaacgtaagacactgccacccatgcctgggccatattttagacctagcagcagctaggtcttgaagccgaggtgagctagaaggggtactccctggttagtcgctcgacgagcctaggcggagagcaagctgatttgcattctcatgtgtattcttgagacaaggcctctggtttctttggaaaatcatactgatatatcattagttgatgagaattttgaagctgattattggataagagatctatggcccacatgctttcgtgacatctcctattgaaacgtatcgtaagagaagaaggggccctaatccggggcctcttcttgtgattgggctcgccgttcgttgctaccagcacctggttggctgtccccgcaccttgatataaatttgaaggagcgcttttttgatcgacttacaaggacacttccctccaaatcttcttgaggatagttatatgtgaccacgagctactccagacgcgaacttaagtcagtttatctcggatactcattcttcttaataatgtctacttttcacggaagcgattcttccaaggaaccaaatgcctccgactactgcaatgatgctactgctctacctttacgccatcttcaaatgagcgaaactacctccgcctctgacacgtcctcaaactttgcacatatacacccttcgtctataccatctgagacaaaattttgccttccccagttctcagcttatccatgggctccttatctgacaatgccgaaacatccgctcgagatgactgtcgatactcacgcaaacccttctacattcagtggtcaggctgtaaatagcgcgttgtccgacacctggtctacaaataatccgttaacgagagatactcaagtcctgtccgcggagagcactgagccccttagaagcaggtatgtctccaattcatcctttcatagcaaatcgccaactgcctcgtcctaggaatacaaaaagaaacaaccaattcaagtgtggttgggagaattgtaccagctctggaggattcgcatctaagtcctctctcatgcgacatatcgaattgctgcatgtttctccacgtggattcgcatgccctcattgcagaaagtcctttaacaggaaggatcagctccaggcacacagaagcaccgtacatgttggctggggctaactggcgcgtctcaaacgcaggggtagtgtgtcataacttgagttgaagattgattgttcagtactgcaaaattcttatgctagagagggactagtagcaaaacaatgtaccgcacaagtaaaatcgaaattgagttatagtagccacaacaagaacaagcatctttgtctaccagggtcagttctctatgtaaacaatgcagccttctatttgatatcaaagttgtgtgagcgaaggctgtgtatgccaaatatctcaagcaagatatgagagaatgaaagaatatcttgccagattattaggattcctttttgttttacctatttgcacgatggattccatcggtttctacaagaaattacgatactataacaatgactcattgtgcagagcctataatccatactatagacggcgggaatcgagtattcagtacacgcacgtattgataaagccgcacctgccaagaaaggaaaggaagaaacgagtatggaagtaatctttgaccattgaaccagtggccattgaccatggaatgagatgggaatcactaaagcctgccccgtgtgggagtatagaacagagaacagagaatcataccgagcccgcccagaccagacgttggaaaagaaaccgttggacaccgtgatcgtagaagacaaacatacaggcgcggccttggcagcaatagagatataagggtcagagagcaagaggaggaagtagaagagtaggaatcagagtccaaaggtaaaagaagtagtaataaaaaaaatagaaccgttttggggttatcgggttgttgttgcatgacatcgtaaagaataagagaacgccacccacccggattcccagaacagaatcaatagagccaccgaaaggaaaaggagcaaagggggtaaatagaagcaaaacaggaaaagcagaaaagacaaagccacctccgtagaccgtaaagcaaagagaccataaccatatagacacgagtgagccgctgtctggtacatattgtagcaataaacggcgttttcctcccaaacataatagaagcgtagggtctatctccaggcaaacaaaaaaaaaaaaaaaaaacaaagaactcgaaaaaccaaaagaaaagaaaattccgcccggactcccacgctccatggccataagcaacaaagacacggaaaggtatcaagagattagatttgaggttgcgccatttgcggttgcgtcgccgccgtagtcgtccatgtcgacatgggttgcgtggcagcataaggcccagggacgtagtactgggagcgatccgtgttgtagtaggacggatggatgggatttgattcgcgacgaggaacgttaggatcgagaccaggcatatgccgatcgagggctgggtgtgggttttccagctggccggagatgctgaagctgctgcgggagtaggtggccggggtggatggatccatgggggaggtagcatctgttgcctggctgcgcgaggagatggaagagttgcggtaggcggaagggctgtgttccgaggcggatcggttacgttcgttgatcgagctggggagtcccgcattgatgccacctggaatggaggccatgctgtgtgcgctcatcgagtccatgctgccgccgtagggccggaaggagtggtaatcttcctgctttgggggaatggcggtctgtcctgggtttggcaggtacggatttggcgcggatgggctggccatcggcgcgcccatggagtatccctgaatcgggccttgctgcgggggatgtgtcgcggcatacgggctagggtgcatatagaagtcgtttgaaggggtgggcatagcgtaggcgggtggggccatcatctgcgggcgatatccgtatagcgcggcgtgggagggctcctggctctccacggcgttggcctctagctcgtcgatcggagaacggaagctttgtttctgggtgagttcggtgcggggtcggataaaccgtagggaatccaccatggaaggtgggttaaggataccgcgcatcacgtcctccacactgtagtatgagaccaaatggtgggtcacgcccgagactgttacgctcatcgtctttttgactaaccccgagtccttgaagccgtaggaatcaactagagaccccaccaatgcccgttcgagctccgattgatgggacgaacggtccgaaaaaggcgccgagttgggcgatgtcggagaatagccctggctgctgtcatgtcgcggatacggttcgcccggccggccggcgggcactggtcgccgagtggccttcttcatggcgcgcttcttctcccccggaggaaacggcttgtccaactcacggtagaccaggaagttccccagaatgcgactcgggctccaggtgactccatcggtccagcgcttgatgcccgaggcattctcctcatagatgaagacgctcccgctgcgcaccagatggctgcgttcccggtcgtgagggcggcgcgggacatgatgcaagacaccggtcaagcatgcctcgaaaaggattagggcgtcctgcgtggttgcgacatacccggtgaatgtgggctccaacacggcggcggtcccgttcaccatgatgtagtgtagtgaaagagatacaaagccaggtgcgaccccccgggcttttgcgaagtgatatattccccgaacgatccaacggggctcaaaagggcaaaaagaaaaaaaggaaaaagaattaagctaagagatcgaccagggtatggagaagaagaggaggttttgagttgggacccctcagttggagaaattcccagggatcgtgatcagcgagaagcacgggccctcgagtcgagtcagcgagtcaacaggttgcaccgattcgatcaggaaaagatggggatctactcgaaacccgttccacggtttgagttgcggcaattcccaagctttctttttttttgggggatccactgagagaagggagggaagggaataactatgtacctaaacggggaccctggctagttaagcgagagaggggaagtagagaatcagaaaagaaggggggaggtctgagtgataactccacagggaaacatggtacaatgataatcattgattagattatggattatttattggattattattattatattcataagttatataagtgatataagttcaacagaaatatctatgggatagacatcgggagtctaatggctaatgttaatgttaatgttaatctcggagggttgaactacttggtcgaaggatgagcctggagtatcaatgacagatatgacatgcgatattatgttttgagctttattttattttatttaatttatttttattcctttttatttcctgatttattttccattttctggattcggtctagtcgacccagaaaagagaaaaagaaaaaagaaagtggaaaccaaataaatcaaataaaataaaaaggagacggtggaattcggaaagcggagaaatacggagaatgaaacatcaaagtcatgatttcaccaaaccctccgcgaaagcaggtacagtttcacttagttcgagaactgaactagaactagaactatttatataggggcaatcttatcaaatattattgccatgaataatagtatatctacgctctcatataatgagctaacaagcagaatacaaaaagaatagaacaggtcaagatacaatcaccacccccgtgccatgggtgatccggtggagccatggattaggatcggagggtctccgtgacatcgtatacaacatacatacaacataccaaagacaagccagtagattgatgttgtatgtactccgtagtcaacggacttaactcgctgttgagtctgactcatcaaacacctgcctatttggaagagaaagaaagagatcatctgtgtctttcgccaggcagcgtaaagtacagacggcggccgtccccgtcctctgattggccgcccaaccacttcccccacttttctcatcgacgccccatcccagaaaggatcgcctttggtctcagacaacctcaggaacctcaagaggatcccaagggccaatcctccgaagagcgtcatatctcggggcgtaggtctgtgcacgccataccgagctattgaacttgggatgggtcgccgtccaacggcagtcaaggataagatcctcggtctggagcagccagtcagaagcgtcagaagcgggtcgtctgccctcacacccgtggacgggggattttaatataaaaaagaaattccctttctcgacatcttttctcttttttctttttctccgggtccgggtatcggtgacttctggttgggttatccgctgctccatgactggtttcccatttggaccaattccccaacgaagaggacgaggaagaggactgagcgcggccagttcaaggtagatctccgcctggacccgtcgattcggtatacaatctacgtcgtccgtaccataatgtatcccccgtggactatatatataatgttcgggtatcgacccgggtcactaaacccaatcagcatgaacggatgaacagacccggggacaccacgcgtcgcagataagaaacaaaaaaaaagaaaaccaaaaaaaagaaggttaggcttccgggcgagagagttttcggtaacttcacttttactttagtttttttttcctttgtcctctatctcagggcgtgaaagttaagaggggaagagggtcccgtaaccaatgcagaccaagaaatgacgactggggttggattggacggccaaaactttcgcgggagatcctcagcagatccaggccatgccacgctgccacgcacaaagtccagacacgggtctcagccacggggccacctgtctggctacgcaccccggtcaagccacggggctaaggattagatcggcgggcgattgagggaattattcagtacgagcaacatacatcggacataggacaggaagttgatccattgtatattgtacatagatagcggaggacagtgctccgtttaaagtcaggtcccagaggagtggtcggccacgcttgttgaaactcaattggcgcgaatgacagatgtcaggatataaacatttagtgtcgagatataagatagggctcgctaaaataagccagtacgtacgcaatgtgatgtatcactccgtataatcgccgaagtccgatagcataagaataggagaaaccaataattcagaaaccaaagcctggaccgaaatctgagatcatcgatattctgcacagcccatcacaagcccaggatggctctaagcgcgggaaggacacagcaaagaggctagcgttggcggttagacgtaacaaaggtacccaatatacgagaacaggaaactatttacatagtgtggtcggagcttggcatttccaatcgaattaccccacaaatgcgcgagcaaatcacattggaaccgagggagcaccagatgtggtcctatcttaaatagacgagaggcgttttttccacggacgatctcggtgcccattatctttctcgattcgaagatctcgactcataggtcctccgtactccgtactccgtactttcgagtcgatcgctggcctgcgatttgtcgacccacacaaatgcacacacccatacccagacactcggggccaaaagaaggattattagattacatgttttattataggtgggggatgtggaagctaagacgcttgaacgggtaggtgaatagcgattgtaataagcaagctgcatgtcaggtggagttttcgctactgaagaaaaaagaggcgcatctaatttaattccattggcactacatcaacctggacggagtactcagaaatcagctctagacccgttagggctagaatcggcgccgatacgaagatcgccccctcgaactaggcactggatgcccccggctaggagcaggagacacaagcacagcggcagccacacagggaaagaataggcaaatgcacgccccgtgaaggaaaacacaacccgaaataactcgcactaatcgcactagtctcagtggcgtccgtactatgctgtcttggggacgaactaagataatgccgcaactctctcaagggtctagcactaaggggcgatcatcattagggaacttggcgtcgacgaagatccggtttggtccaccgactggatggtttcgggggattgtagctttcacttcggaggctcggggaaactatatattaatctatgtatagttaagattgggtatctatagttatccattctagtcgtagatagatacaaggtacaatgaacctacggagtgcagaagatgtgcatgcctatgcaatgcaccagtatcacacccttccactatgcaccgtgccacaagcacaagtccctacatccaacctcgtacagagatcatgggaaagcacaagggcaatggcaatagacatagacatggactccgtctccgtactacctccctaatccgtccacaaacccgagactgttcgggacctgatcctcttacccgcccaggacaatagcctggcctttctacccctgattctgggtgttgcctattggctgttaagattccacagatattagagaattgttttatagaattgctcatttgctggttctttgcacggtgtggagcagtagtacatcagtagtacagtgctgtacccgacaatcataggacagcacccaaggtatgtggttgaaggtatgacatggcgcacagtggagagaaacaattcgtcgtcagcctcagggttgaatgcgcgatcatggagatcgtctatttattccatttcggggaggattagtggatgctctatccgatcgcgcttgtgtgcatggaacattgaacaaaggactagttctcaggtacgagtactcgtactccgtacatgtactccatccatatccatacggagttctgcgcacggagtctcccgcaggaggcaaaaggcaggcaaaaaacaggcaaagaggcgaatacgcaagacatggataacattatgatgtcgggtcatttgtatagcatagttcaagcatcgcctccacctcgtataatcaacacctcgaccccgtgatcctcgtgtcaaaccagccgatcgggtagaaagaaaacataaacgaggccaatgaagctaaggaagccagtgcatccacttatttccactattagttaatgttggcgtgtcacacacaagggatcgctcacgcccatgtggtcagaaggactgttggaacttggcacccagcgctacggctcgtatctgatttgtgcgagttggatcctgtttttgagcaatcaaggttgttgtattcaagattgtatatgggacattgaagcaggtatatcctacattgtagggattataaagcatgagtaactatgttgcaatctctagttagggctttacttatttagggctcgagtacttgattatgggaaagacatcaattcttggcatctgtatgaatattgcagctatgtataaacagaacgacctttctcggcttccgttttccgctttcttatttcccccttaataatagcgagacttccacaaccgatggtaggaagccgatgtaactagctacaatagttatgggatcaagatgtatcaaaatatcaattgatccactattgaaactaggatggctaaatccagccagataaaatagagctcgagacttccaaaagtagagtgcagagtctgatatgaataccaacagttcctacttcgccaaagtccgtcttaaatgatctaggggtaaagccaagcttataacattgcaactcaattatatgcattaggggaaagtcagttagattgctatacaaagtgttctccgtaccgcaaccttaagacatatggccatgcatcgacatagtggacacctcgccatccaaagcattgggatctatgacatcagtcaaaacccactaacgattttcaagatcttcaacgacgctattgactcattaataaatggcgggctcagggggagctactctaaacctctaggaatgcagtatctaactagcctcggcgattcaccttcttttgtaataattctcgctacggtataccttcctttgacgcacattagaagaatgcgaatgcgaacgtacggagtacatctgactcgggatccactaaatagttctgttcaccgatattgactcaaaaacagggccaaagcgaactacgccgttgtacgcataaagtactctatgatatacggcctcggtctgttgtatgtcgccctaagcactgcggcatacatcgtctctctagcgccgcgcactattatcacaataatactttccatcttgctatgtggagaccaacatggatatcatgcacatctatggagcgtcgccactatcccagcccagctggaacgtgttcccgtccagttcgcaagataagacccagcattctagaaggcaaatcctgacatcttctgccgacccgccatgtgcattcttcacctgcaccttccctgctcagctgccaagccgtcctagaagattgtgctagttggtgcatgaccgtcggcacataactccgtatgtacctagttgcttttgcctcatgcataccacagaatccatacaacatacatgtgcggagtacctacgacaggattttcctatagatctgtaagagcactaatagcagcgacatatgacacacgcaaagaagcgggctagcaagcaaggaaccatccatcccccttacgaacccgagaaacactcacccctcaatagccaaattgtacgtgctctgagaaaaaaaaagacgatgtactccgtactccaacagcgcttgcgaaagaaaaggatgcatcatttcgatagctcgaacgcctctcgccgatccactacagcttacccatcccaacgcgccccgcccttccgccgggtgttaactagcggcgatgagatttgtgatttcgcactcgatatacatcacagtaaccaaccaccaatagaaaaccctcaacaagcgattggcgtaaccgtttgttgggaaaaaaaaaggcaagagaggtgaggtgagatcagatcgcggccaacggcttatgcacgccaccacctctcccatcccatcacagcaccgatcaaagcacagcgtgcatggcgtggtagggacgtgcttgcaaaaaaatcgtgattcgtcatgtacgagacccaattcggtaggtggttgttcgtcacatctggacgaggaatgagattggatggttcggatacgcgctgcaaccaggatcacagatggtggcgcggtggctttttttttgcgcgggcctaagcacctaggtctgtttatttcgagggccaattcggcgatgcagtgcatggatcaggggaggagggatggttcttgttatgctgttgtggcctgattcggtcataggtacctctcctccccgggtttggtatatccctgtcgcgagaactggtgagtgtgtcgttccatatgttcccccttgcttgttttttttaggttgggggtctgattgggcttggtgcttgagggtacgtggctttttatccttgttttttggctttttctcgcgtgttcggttcaaggggaggtggagtacagggtatgttgacgtctgcgttgggttaggtgcgtttttgtagatctatcttggatgcttgtcttggatcggtttatgctttcgatttagctgtgaggttgtttgagacccttttcccaatctggacaggtactttggcactttagtgcggcttgattgatgaagaattgtgaatattccatatgctggataataaatatgcaaagatgcacatcgcagatcaaatagtatacatgttgatattgtacagtcaaagcacatgcgccgagtcccgctatgccaatataccaaagaaaagagagtcctgtcgagtcatgtcgtcatgtccattgcatggaatcaaggagacgaacggatcacatcctcaacagcaaggtcttctccctcgacctccttagggaacccactacccctccgcacatgcatcagcaaccgcaaagcaccaacaggcgtcacgccttcaatgcgcttggccatgccgacactgataggccgcacacgctccaggacctgtcgctcctcgttgctgataccgtgcacctgactgtaatccaaatcccctggcagcagcaagttctcgtcctgttggaaccgctcagccatcttctcctggcgtttcatgtacggcgcatagcggccttcgatagcgacgcgggtgaggatctccggcgcaaatgagaactgggtatatgtcttccccggagactcgataataggaatgagggtgttgatgtcgataccgtccagacacaagatatcgagcgctgagcggatcgaggtatcagagcgcaccttgaagcccttgcgggaccaggcagacgacgagagtttcgtgttgccaaggagagtctgtagctcttggatctgcgcttcggtatcggagaagtgacgccaacgcttgtcggagacgacgccggcatcgcgggccatgcgggtcagacgtaggtcggcgttgtcggagcgggtggaaatgcggtattcgcttcgcgtcgtgaacatgcggtagggctctgagacacccttggtaatgaggtcgtcgatcatgactccgatgaagccgtctgaccgggtcagggtgaggggtggtcggttctgcgactcgaggccggcatttgtgcctgcgatgatgccttgtccagtagcttcttcgtagccggtggtgccgttgatttgaccggcaaggtagagaccgctgatcaatttagtctctagggttggtcgcaggttgcgcgggtcgatgtagtcgtattcaacgccgtagccgggctggagcatggttacgttctcaagaccgcggactgttcgcaacatggcgtattgggcgtctgcgggcacagtcattgagatgccgttcgggtatatgacgtcgtttggtgcgaagccttctggctcgagccagatctggtgctgggtcttgtctttgaatcggatgatctttgactccagggagggacagtaccgtggcccgcgcacagtctcacggatgtggatggatttgtccagattggcgcggatgatttcatgggctgcttcgtttgtatgggtcatccaacaggtgagctgaccttcgtcgcccacttcaacagttttgttaagataggagaaagggtgaggcggcgagtcgcctttttgcacttcaagagcgctgaaatcgatggtcttcctatccaaacgaggtggtgtacccgtcttcaaacgtcccagttggaagccagcttctcggagggacttgctgagaccatatgtgggggcttcgcccatgcgtcccgaagggaacacatccattccaatatgaatctcaccccctaggaaagtgcccgtagtgataaccacacgtccagtaggaatgatctccccagattccaaccgcacgccaacaatcttgccctgagcaccgggggtgttctcgatgccttcccgggagagcacaatatcagccaccttgccctccacaatgctcagattttccgtgccagccagctcctccgacatataccgcttgtagagatcgcgatcgatctgcgcacgcggtccccaaacagccgggcctttcgaacggttcaacactcgaaacatgacaccagccttatcaataactcgacccgccacgccgtccattgcatccacctcacgaatcatcgttccctttccaatgccgccgaaactgggattgcacgaacaaacaccgatattctccagcgagggcgtgaccaacgcagtgcgcgcgccggaacgagcagcagcagcgcatgcctcagatccagcatggcctccgccaataacaacaacatcgtatggtctaaacgaaccaattagcaagactcttgatgacaacacggcgaaatcacgaaccgtgtgttatctgtaacagtcgcaagaccgcgactccgacccataaatgagcggagcccgcggttctgacgcatcagagccaccgaccgtgctcgaaaagccatgatgggatgcaatgcgaatgttaccctaaaactaggtacttcgtacaaactggacgatcaaatcgataaggaaaattgtatcttctcacgtgaccgaccttatacccgttaaccccgggcggtcacacatctgacataagcgcttgcgccatcggccaattgcggggctgttgatgttcagttgtaagctgacctgtggtaagctgacctggactttttctataactagcccctcttcgcattttcgaatcttacctcgcaatccgtgagaaaaacccccaaaatgaaggcatactggtatgacaacattgaggtaagcacacaccaattggccgtacccagctttccaagcatttccaggtacagcccacctcagaagaacaacgctgatgtcatctatctacagggcgaccagcgcgagccgcatgactccggtcgcgccgtgtcagaagagaagctcgcctcgctaggcgtgctatacaagcactgcccgacgatcgatgcggtggacaagatcgcagcggagcgcggataccgcaaccgcgacgaggtctgcgtgtcgcctgcgacaatgggcgccgtgtacgaggagaaggttaagtcgttcttctcggagcatctgcacgaggacgaggagattcggtatattctcgacggggagggatactttgatgtgcgtgggcaggaggacgagtggattcgcatttgtcttgtcaaggaggatatgattgttctccctgcgggaatttatcatcggtttactaccaatgagcagaacgtatgtttcttggctttttgtgttagggaatgggactgacttttcttttgcagtatgttaaggccatgcgtcttttccaagacgagcctaagtggacgccgttgaaccgtggtgcggatgttgatgccaacccgcaccggaagacttacttggagactgttgttagtcctactgcggctgtttagagtcgctttaaaattgagatgcgttatgacggattgcacatatactactgaccgattggaatcggaatttcttgagattgtcttatatctttcgttgcatggtgcttttaactgtacatggggacagcaaacccacagtaaatcaatcgaaaccatacctagtggtaggaacggtcaaccgacactcacttatatcaatggtctgggatgccaggcgtccccaatggcgtactcgccggcatggcaccaggcatatcaaaatggtcactcgtagcaccgccgctctgttgcctcgacatactcgagctgcgcaagccacccatatcaacattaaaactagtcgtgcgcgagccagcaccaagccctaacatgcccccacggaaccgcagcccctccagctcccgagcatgatcgtcggagaaccgcggtggtcctgccacatcggtagaactcacgctgcgcggtggtgccgttgatccagcatccgagtcctccccggtccggacgcctgttctgcccatgcgcggccataggtctggaagtccgacaacttgaactcgaggttcgacgacgcgctcctcgaaccatgcgtggactcgcgcttcgactagttgcgctatcttcggtacatcctgcagtcggctgcgggatccgatgagtgagcgcacggagaggtcgagacggtaatctgggaggaaggagaatgcgacgttgcttttcgggctgcttttcggtgggaggtggtcttccgagcttgtgtgctctccgggaccagggggtcgattccctgcgttgttccctgggtctgatgtggggtgcgctggtaatccatcaggtgtttggagtggttctgggggttcggtcgatgctgggatcaaggatatacaaagtgttcctgagaatctcacaactgaaactgacagcgctactggtataatggcagagcgaggtttgggataattcagaaccatggatgtctcgacagcaatagaaaggttgtcgtcgctaaggtcgacatccagtagcgcctgtagccgtccaccgtcggacatggggtcgtcaacggcgatgatgcggcagttgctgaaaatgggaaactcttcgcccaatgagatatcggtcacatttatctggtctatgaaagatggtttcttctccgggttgttcatggccgccgttagcgagctgaggattgacgaagtgggtgagtccttgagggaatatgctgtctccctatactgagcaattgtctgtgcaatgagcacattgaaccagtccagcgactcgggttgatgtgaggagtgatgcatgcggtgtcggccctgcttgctcgtagggttggtaggaatggcactgtagtatgttttgcggaggatggagcgggtgtttgtagaggtagaaggtacagggcgaagaacattcgacgtggacggtttttctcgtaatgacttttggctatcttgaggggggttatagaccgagctattgcggcggtgtgttgtgcggttcgacatgccccgcgatggagggggaggcgcttcaccaaaaatgaaaaacttgatgaaagcgcctatcagtagtactactgagagttggccgagaaggaacccctgggtaaaggacaagctaatgggtgttagcaagatcatatagtccattccatggacagagggcgtacgaggattgagtcgcgtatggcgcgggctcatctacataattgtcagcatacgattcaaaaacttcgagacaatgtcactcactttgttggagcaccattgtcagcggctgtcgacaattcttgtcacaataccatcccagatgaagatgttccaactttcggatctccgaggcttggccgagatcatatctaatcgatatgccaccctcgaccgcctgcctcgaaagatttaaggaagcgccctaacctatttcggggctagcgtcattagcatctataaaatacgaacacctgttcatcctgtttcagtcttagattgggtcactgattgcgatctgggaatttattagagagcatcatccgactgaaccggtcgatctaactatcagtgcccgttaagtgatcattcaatgctcagggtgtgcccgggtctactcagtagtcaaaaagcggcaagggtgagactaaagtggaaagggaaagccaaaaaaatggcaatgtaagataaattgcagagtttgtaaggctaagtccaaatacaacagcatcgtaataaaagcaacagcttcccccctgggcaacctgattaatcaccctaacgcttcagctgactggtcccatttactcttctgctggtagcttcttgtccttcaagtattcacacgacctcgcggttttactgtccttgttgtaccaatattagcagggcatatcccatctgtgctatgggggttgggggttataatgtctgggttgacctttcatttatactcactttggcttttgttcctgccagtttcggatcgtaccttccaatagttgccttgccttttaaagctcctcgtgatttcctactgagttcctcgtcatttataatcatgggtgatctatgattctattcacatatcgctaactctagctcaacctccgcattactatcccaaacggtactgtaatcaaatccgcttgggcactcccagctctgctaaagacttcgtcaagcccaccctgaccaaattgtcaatctccttagtcgtagctacagccatgatccccagcattcccaaggaattcaccccggcctccttattaatcgcacctcgtcttctcggcagcacgataatccacctcttggtaagaaccatattatgcggacagactgccccaggcgctgcatttgccgtatagtccccagccaccttcgtagcctctcgcaacaggtctttgtaagccccgaacaacgcagcaggagtcacatcgccctcaaaacgtcgataaaaccattcaaaaggaaccttagtctcaggttctccgggagaatccaggaaagcagcaaaactgttcgccggcaggggcatcacctgcatatgcttatgcaggcgactgcatccgccgttctggccgcagttgtaaaatgcaacataatcgctttctgcggagctgaggagctgccacgcgtcttctagatcgacctgctcgagcgcctcatattgtcgtttgtgtccatcaaacgtgagaagcatgagatggggccgagcaaagcagaacttgttcacgatcactaagtggctatctagcgcgccgagctcaaacccggtcgtgcttatgtcgctgcctggtcgcttttcgggttttgggatgccggcctctggttgggactgggggctggttagggtgggttttttggcgagagcagaagtcagaacgaattggaacttggtacgttagtggatgtttggtttggattatggttggatgtaatgtactttgaggtcgccgtcaatgtgctcgatgatttgttgtttgtcgtcgtataggacgaggccagattggacgaggttgtcgaatttggcgaggatgaggggttcttccattttgactgttctgtgaattgtgttagacgcaagtgtattctaatattttatggagattgggtagaaattcggtgggagcagcctatttatagtctctacagattgcgtgcacgtccgggatcttgatagtgggattaccattgtttttagggtcacgacaatgggtttttttgccagacagaaaattagtaactagttaataagtaactagttagttatgtagttacggggaatgcgaccccctgcccgagattttaggcatcagctatctctgctgtttcttgaatcttccgccagcaggtttaaattcctgtttacatagaaaaaaatgcaccattctgctcacaatttcatgcttctcacttcaattttattgcccagaatctataagctatgtattgaaggccttgaatacaagaagcccccctcaacttattatgacgtattaggtcacgtgccgcatcacgtacaaggtgggaagaataactacgttaagatagagagaaagaagaagaaagttgcaaacttagaaccctcccgcttagcaatctagcaaacatataaatagcaataagcaagcaaacataaatcgtaggaaaagcggccaggaaagcggtaaacatttatattagttaggcggtcagtcgctgcccgaactatccggcaggagtcccatcggccaaaagggggtcggaacaactatagggggggagggcgccctgatacaataccctaattaaatgcaatcggtaatccaccctagttatggcgtaattgtaagaagttgggctgcgaaatagtcattcgcctcacaatttcaggagatcatcgaatcatctttcttccaatgcctcatcaatccttccaggtagccccgcgtcgtcggtcacatcaatggcaatgaagtcatcccgagtgtaagaatacgcctgattttggagccagtgtcccagttgatcaaggataactagacgtatatcaagtgctttgatggcctcgtatgcccactggtggccaaatgatcctttggcgatatcggacgccggacgcgcacctaccatgacaatcttgcgtcgagctggcttagtcggaagtatccaatcaaaagacagtcgaaccttcaagtgttcctctagcatcttcgggatcaatatcggaagctacttcataaggaatgccccgggagaagaaggcaaaaaatataggagagacttgtccccttgagccggaatcggcgcaaagccactgtccggactcgacaaccgaacgaccgagttcacgtattcgagatcccgcaacctcaagtcgagaatatcgctcccgcagagatacccaccatgaggaactagaatcaccttcgttgccacttcgacctcgtcgccggatgcttggattgtgcggacgggatattcgatcggtgcctgcggtggacagaatccgaccaccttcagtggaatttgtggaagaaattctcaagaacagatcaagactatgaaagaagcccggtgtcttcactgtcagtttgaaccgccagcgacaggaaaactttgcaggggctaccgtgacgcaccttcgctgctactcgagtccataggtgctgtttgcctgggtgcttgcaggcagtctcaggcatttgggacctgggagaaactttgtaacctcccgcggtctccacaacgcttaactatatttagtggagtcctcgtggaggctcaattaatttcttttttttttctttgtgcagctgttgccatggtatacctgtcgtacgccataggcacagaatggcaacttcaaatatcgcagtggacacatggcaatatcccataggtgtattctactgcattgcatcccacccctgtcttgcccaaaacgcgcagtgcgtgaaatgaaaaaaatccttcagcacttcgtccgataatgattccaacttgatgcggtaaagcccacattgcaagcggataaatatagtagaatcctttcgtgggataatctatttggcttcgaggggccggcctgcaaatcatgtaccattatacttatgtataataattgtcttccaagccagataaagctgcacgtaattcctaacgatactattcaagcattcaccccattgcctgtgtggggaacaaggatataggttaaggtaacttgttttagtgctcgagtattactatgtcgtaaaatcagaccagcctcaagagtagtaattctaaatatatagagaatttccagggagtgagaagtggtccccccacatatacatattgtagatctgtgaactcctgctacgaaagggatgcgttcgttcctccgcccagcttaccttttaagttatgatcatgtaggcgctaacaatggaactttccagttgacaactagtttgttttctttcttctgttatatcttttggaaacaatataggctatttcaccactggaccataacaaaaaccaaggtacatacttatttagggcttagtgggaccagatatgtcctacttcttgtttgaccatgcattttataaagagtttaggattctgagaatgagaccgactttgacaagacccatcactagtaaaaagatcaccccaaaaatttactaaagtcgagtcgtagaacagtagaaagctgaaatcaaccaccttccatcatgccacggaaaatgagggggtttctacagcgccacgtcaaagaataagagtgaaatgaccatcgcatgattcaattcgcagcttatcagtgatgtgctaccctcgaccgcttctgaaactttaaggaagcgtccctatctatgtaatcaggtcctagcgtcagcgtatataaactatgtatgtacaccataagtaccccgtacaataatatagtacttgtggacctaaggtagatagcgggctgagtcggcagtgacataggctataccatggcatccattaagcctaggtgattcatcaccacgcaattgtaggggtatcaaactggccgccatacgcgctctcagctcaacctatcgtcaataattgtgcctcataatggtgttaatacgaggtttatccaccaatctcattatgacacgccccgtggacacccgtggacacccgtggacccctagcatattgctatttcgagttgtttgatagtgatcagctgcggggtaaaacatgcaagtcgagccatttggaatgttttctacccagtgttattagaaatcctagcctcgttcgatctcgggaggctataaagtcacagttatagcccacttttaattgcttctcacacaaaaagtctcaagtttttactctacataagccaatactcagtcacgctcttatcaatcctctttacctcattactaaaggttattcattagaatgtacttatcacccccggggaatgacattccttgtggattggacttatggtttatctaggtgtaccactaccataaccactaaaacggtgaccaaagtcgatgggagtacaacgaacacaacaaccacgaaaatagcagattgtggagttgctacttgcaggacgtcggcgtcttacctaggttgagctgtatgtctatatctatgaagatcacgttcagcaaaaatgtcccaactaattcaacgaaagcatagatcgggctgttcgacatcggacgaggtgtaacttgatcgagcacgcacttgaatgaagttggtgtacaagcttgcgcactgacgccgggggatgtgatatataaatcatatgactcagctatctttacgctacataggctacatagttaggtggttcattcattgacgataatctaaccaaggtcactttctcaatcacttgtagttctaatctattctccataaagaatcttcgaagcagtcgccaatggtagtcgatgaatggaagcaagtccagatgtgacaggagtgacttacttttgttagtggtctacatacaagtgtaggtacctggtctggtgtcttgcttctataaagcggtggcattagccctaagaaatcagaaaagggggtcaccaaattcgtattattgcaccccgcatcctcaccgcctctatatcgatgtagtcaataatcaatttggatcttcctccccttctgttatcatctcctgtgcgcatacattaaatcatcatgagtttcgtggaccaagctagtcctaagaatgagatcaagtttgagcaaaaaccattgataaaatcactccaagacttgaatatagtcgagtcgtggaaagatggaaagctgaaatccactaccttctaccatgtcaccgaaaacgaggaggttttctttggctacacctcaaagaacaagcgtgagacgagcatcccagaattcaattcagctctgcagcgcgtccaggatcaagatatttatccaacaattcccgccgacacccacttgacacttgcaccggaaggattaagcgcttcgtcagtttacgtgaaacgaccaggcctacagtggtacgaggaaatgattggcacagattatctccccaaggccgttctcgacgagacaatggtgatggagcaaatctcacaatcgcctcacgaaaacataattcgatattacggctgtcgggtgagacgtggttacatcacgtcgattgtgctggagcggcttgaccaaaccctgagccagtatgtcacgacgtccgattttcaagagctcgacaaagtcaagtttttcgaatcgctcaagtcggccgtggagcacctgcacaccttggggctggctcataacgatatcaacccggataacattatggtgaagaatgggtcgccggtgttaattgactttgattcctgtcagccttttgggaaacggttgcagtctttaggtacggagggatggtatgaagaggtgttttatacttctgagaagaaacatgacatatattcccttgagaaattacaggaatggcttcaggctgctaagtgatgttagaaaaagtcatgtctcgatacaatatatagctattaggatatttcttattctctattgtattgtttgtacagaactaattgagaacatagtacggattatatatggaaatgtttgcagagaaaaagacatggtcaaagattctaactatgggaactgaagtaaattacataaatacgaatagttggtcacatttgctacctctatattaagacaaatataatctagttggctaaatcgtagttttttatatatttttatagatatcttctctccttgttgagtcttttgtcatctacctacgacaaaaaaaaaaggttggtatagataatgcaaacagagcaaacaagctagattattccactccacttctacttaactgaaggacacgaaacccttaaaataatcgccacttgttgactcacaggctacagcattggggcctaatctctgatatcgtgcttacaactaatcactacctcggaatcaatctcaaccaatactcctccaggcatagatcctaaaccacaagctagagagctgtcagctctcaaccatccaaccatgcacattctccccaagctggcaatcacagccttactcctcatctcaccagcaacatgcctctcaagctccaaaccaccaggcaaagacgccatccttctatcaaacgtgcaaaccctcacactccgcgcccaccgcatgaccaccgcacggcgcgtctcaccaatcccccaactcagctgcgcaggcccctcaaaacaaacgtgtaacctctaccaaccagaaacaatgcgctgcacaaaccaaggctacgactacgacgtcgaagacgtgcagtggacatgcaccgcagacatgccggcagagttcaagctcggcgcaacagatgtcatctgcgagggataccgcaatgccgatgataagtgggtgttgaaggggagctgtggggttgagtaccggctgctcttgaccgaggctggcgagaagaggtttgggaagagaaacatggattcggagtggggcgggagccagtccgggactggggttcagacgatcatggagatgctggggaacctgattttctttgggttcatcgctgctgttttcattctgatattcttgcctatcttggcgcagtgtttcgggtgggggaatcggcgaggcgggcgggcggggcagccaccggggtggggcgggttctggggaggtggtggtggtggtgnnnnnnnnnnnnnnnnnnnnnnnnnnnnnnnnntctggggaggtggtggtggtggtggacctggcggaaatgaccctccgcctccgtacagcagtttcgatccttataaatcttctgctcgtcagggctggacgccgggtttctggactggtgcgctaggcggtggtgcggctggttatcagatgggcagacgggcttacagtggatcgcgcggcaggtctgatggatatgaccccggtgaaggcagctcgcgctcgccgcagttctcatctaccactgctagtactgggttcgggtcgacgaggcgtaggtgaacatatggacatgccatttacgtatgtcttgcttcgctcgtctttgctaccaacttggggagaagagataccaaaagacagacagaatttaacgaagtcacaaatcaattagcgaatcaaacagcctttaaccccgggcttgatcaatgtgtatcctataatcccactcagaacgccgtaaccaataatctttcacttcataaattgtgcattataatccccgacttaagccgtgggaaagtcatcgattgatcccagaacctcctctgtaccgcctccctggttcttcacacccgccttcttgcgcgacttcttcacggtcgtgttgtcgttcttgacatccttggaatcgctagtcgggttgcgcagcatttcctcttgcatttccttctccttagcgtgctggtcctcaatccgcttcttttcatcgtcaagttcctgctggacaagcttgggatcatcgtaaacagtgttggtcatctctgagtatgttgcgatgtcgatagtctcagaaggtcccatcaaggtgtctttgattcgttgcggatcacggcgttcttcattgttaaactttaacttgatctgacgacgagagcgacccgggaacattttgctgataaccatgaaatcggtaccgaacatgcggagaccgcgataaaacagttctgtcatatcttcatcccacgcttccgtctttgtacgtttgccgtacgaggcctgattaatcttccgggtgaatgagctttccaccacatcttcgaggtcaccggcggctctggcagcatccgcatgacgatcgacctgcaaggacgtattatccagcacgatctcaccgttaacgattcgcattatagggccactttggggtttccagtcgactggctgttcggttttctcttgttcaggctcagtctgcttgacgggcgttcctgttcccggcccaggggttccgccctgcttcttccgttcttcttcggccttatcaatcttgcgtagctctgtctcgcgtttggacttctttccagttctaagatctttgcaaagttcggacattttcacaacattcggcaaaatttctactgtttctgcgccatccggggttggttcgcgcttcttgcgggtgcgctttggtttctcactaccctcaggatcagaggtaccggtctttgagtactttcgtttccttggcttggttggatcgggagtcgaaaggttggattcaccggccgttgcacttgaatcttcgatggtaggcacgattgactgagagcctcgacgacttgcccctacggatacggactcctttcgagctgggaccgcagtgactgtagttgataaagttcgagcgcgttttgctggtcgaccctcgactggggcagcttgtccagtttctggttgagattgcggcagagcttcatttgaatcgacaagggtttctgcggcccgcgctgtttcaatcctagcgtactctaaaagagcgttctctggtccatgatcctcagatacaggttgagcctcactagtcgggacatttgcgggaggtggggtcggctgggtggaaggaggggtaggtggagcagtcaagacaggcgcgggttgcgagatagagatagaggctttgcgtttctgtgggagaggaatcgcagctggcttaggaatttgagtcggctttgagattgtagtcggcttagggatcggagtcggctttgcgatgggtgtagcagtaggtgtgacagtctgtgtaacgatgggagcggtgatagcagcagtagtagtaatcgaaggagtgactgcagcgttcaaagcaatgggcgtttgttccgtgataggcgcagctaccgacgcaggtgaggatgctgtgactgcccgcggctcctgttctgcatccacagagggcgtcagatcagaggaagctacatctttagctttatcttcctgaacgggctcagctggtgacggttgggcaacactaggtcgtctcgcgggcgcggcggcgggcgcacggcggataggcgccttcggagcgaatttcttgccggttttatctatcaaacgcacggtcagagattgcatacttattcttctggtccatatatactcactgattgcagaactggagaaggacttcatggctgcccattgctataaggtgtggattgatgaagatcataaaaagttccaggccggggaagtgggcgaggatcacgtgatggcactagcggacgctaaacctcgttgaaaatcctcctgtcttcaactcctcgatctctgccatcccaccccttctattgtctgcccgcccgctctcccttcacttccacttctttcgatttctttcgctatttattttatcttctaccggactctccttcgacaggattgacacagtctcgagatctgcgtctggctgactgacggacggtccggtggtgataatagccctcccatgctagtctagccactgatgccggccgtcgaaccccccgtcaagtcttcagagtccggtcttatcaaaatggaagaccggaagaggcccgctgcggaccataatgactcagccccgccgttaaagaaacaggctaccaccgttaacggtggtagtaagcctcatcctgatgccgacatgccatggaaagatgatttggaagtatgttttggttcttccgcgatctggagattggcttttggtctcctattgggtatatgctaattgggcattttgcgatagcgatttcaaaaagaagcgattttgcgccagatgcaagagtacaagcgggagaaatcctcactggaatcacgcttgagccagatgtcaaaggctgccacgtttcataatgatcatcttcgtgttatcgatttgtggttcaaacaggtagctttccccattgtttgtgccggtcacttggcatgaatttgggagcaggaactaacgctagtatagctgattgatgaagtgaaattgctacttgggccaccgcaagcagaagaccaaggtcagtccccttgttctagccccacaccccacccactattccaatattgacaatattcgcagaaaccccttttaaaagctccttgcagtttgaagacgttgaagagtttgagacgcatttgaaatcgcggtcggaggatattcacgcaataatttctcaagttcagtccaagtctaatgatgcgcctatcgaaatttcagaggtacagactcgccttgcaaagaagttggccgaggagaaagtgacgatcgccgaactcgaaaaaaccctggccgagaagcaacagttggaggaaagccttgaggaagcctccctgcgatatttggtagctgaaaagaaactggatcgtgcgaagagtctgactgttgcaaaattggaaaagcagcagtctatgggtattcaacgacctggggaaacgtcacaatcaaagcgcgaaggatcgaccccggccaatggaacccccgccggagaccgcaaccccgaattggaagaagccaataacaagctcactgcaatttcggagacacagaaggagcaagtccggaaactcgaagccgaaaatgccagtttactaggccaaatcaccgaaatcaaagtcaaggttggattcacctcgttacgttgtcattttgtcgctcacatcgggatcctagtcttcaaagttcaccgatgacgattacgcccatacggatttgtttaaacaccttcgatcacagtacgacgatgtagttaagcgaatcaaccatctggaagcgacaaatgttcaacttcgtgaggaagcagagaaataccgctcggaaagaatcgcatacaagatccaggttgaagatgaaacacaaagtacgattgccgagaaggaagctcagctgatgagggctgaaacggacctggctcggatacggaatgcccgcgacgaacttttagccgaccaacagatgcgaaaggccgcgcaagatcagaagaagacttctagtctgaaactgcaagaactagcagacgctagagaggctcgaattacagctttagagtcagagagtcaaaggttgcggctgcagattgagggctccaagtccgacgacaatatcaacgatatgccgctagaggagcttcgcgccaagtacaccagcctagaacgccagtactccatgctcaacaccgagttgacatcgatgcagacggcctacacgaagtttgctactctcgcatcgcagaaagttaccgactttgcggctatggaagagagggttgcaaggctgacggcggagaagtctaaagcagatcagaagttctttgctgcaatgaaaagcaaagaagcacgggatgtcgaagtgcgaacgcttagaatgcaaagctccaaaacgtcggatattgtggcccagctgaaggagtccgaagcagctactcggtcattagtgtccaacatggacaagcaagccaatgagaccaaggaggcactaaattcagccctgagcaagcaccgcgcccttcagcaacagttgaccgagagcaatattctcatggaaggcttgaaacatcaggtttctgagctcaaagggctttcaacatccaaggactcgacactggcaagcactacttctgctttgcggcaagctgagacagaggtcgctggtttgaaacagtccctttcagataccaagaagagtctggacaactggaagaccaagagtcttggcaattcgtcctcggaatatgaaatgctgcgggtatgttgaattttcacatttgttaatgaatcagagctaactacgttcagacacttgcactgtgtacggtgtgtcgtcgcaatttcaaaaatacggtgatcaagacatgtggccatgttttctgcaaagattgcgtcgcagagcgtctcacgtcgcgctcccgcaagtgcccgaactgcggcaaatctttcggaagcaacgaccacatgcacattaccctctgatcgaccttcgaatcccttgtattatattttcctttcgatgcttttcctctttacgtcttatctctttttagtatgtcacatccggacaggttcatggtgtggtgtttttttgtgtgtgtgtctgtggtttagcaggtctggtttgggtcggcgtttgacgagttatgcaccctcaaccctaactcggggcttgttttagttccttttcctctttttcccattacaaaccaaagcaatggtgggtttctcaaggcgcaggggcgtcgttcttcatcctctctggacgagaggccggcgcacactgattttctcagaggctgagctattctagatttctgtgtcatgtaggactaccgtgtacggagcagaaaaagtacaaacttgacgaatgcaatgtgagattttccataccccaatgacttgattgtcttctattataaagattcttgatattctcattctcatgagttaaagatccgactatacaacaactcatgcctcccaacccaaagatccagcgcagggacaacctgcccagcctgctcaacaggcgtattccattcccgcgcaatgcgcttcatcatcgtatcctgcaacccctgactagccaacacattctgcgcctggtaagggcccataacacccgctctgacagccgcactcaggaccgccttagcatgattcataacaaagacatacgccgtctgctgcaagtcgagacccatagcccgacacaccacaccccagagcggagcaaagtggcccttgggcccgagatcctcgtcctcctcgagacaagacttcaacgcatcggacaaatcatcgatagcagtggcggcgaccgcggtatctcccgaagccgggttctcaggcctcgcgaagctgactctaaatgcgcgctcccaaacaccgatgagggcgcggccttgggcgatacttgcacgctgcgcgacaatgcacggcgttgatgcgtccaggtcgttatctagtgtgtcgagggttgaaggttgccggtatccggctagcacgtaggggagggatgtgcttgcgattgaggcgatggagagtttgaggaagcggtggaaagaggttattggggcggtgcgagcaggtttgttatgagctagataggactctagtccgctagagtaggcgaaggagcctagtgggagggcggagtctgagaggaggaggagggcgtgaagagatgcgctggaggtggtaggtttattattggtattatattgttctaggaggggttagcttaggtatgcgacattggaggtttggatttgcctacctttaggggcccatgaggagggtgggctggggtattcggaggctgctagttgagcacgggcatcttgcaggcgcgactccaagagaatgacctcggcttcgaggtcttgggtgtcttggatcagcatagtgtagctatcaaatatgtggtagagtatcgtatatgtagtatgtacaaagtacagatttaaaaagtaatgttatctggatcggagggtgtcgaggtcttatagaagctgatcggcaaaacgaaaagcggaggccgccgcacttctccgtatcagcttgactgtttcacattattaactgtttttggacttggacattaattactatctcgctgatctcttttgccctgttttccccgcgtcatgaactaaagtcaatctccacaaccatgtcaggcaagcgtctgctcgacgccatccaattcctcaatgtgtcgaaaaccatcgcagccaaacacctggccatccgacaacatcagctagatgtctacacacgcacatcctccttgaccaagggtatcaaggcccaagcagagggtctgatcctaactgctcaagccgccgccgcattggcacgccgatttgacgagccatctccgccgagcccggcaaacgtccccgacaagcctcccgccagcactgcaacaccacctccggacctcgcccgcaaattgcaacgtcaagccgaatcgcaaatcccgtcttcggtggcaacatacagcatctatgagcaaccaagcgctctggttgcgagcaagcagcaggatgtcttctatgagccatcgcttcggtcggagccggatctctcgggcctaccgagagtgaaagtacccaaggccgcaagcgatgctcaagttggtagcgatggattgaacgcggatgtcttccactcgcctattgaatctagtaagcctgctccggttgagcatgagatgcccgaggagatggtccaaggtcttttccatagcccgaaagtgtcgcgcatgatctccggacagccgccgccgaagagggactggaagctggccgcgaagcctcagcagccggtcgtggatgctgctaagcctgtatccccggtgactccgaaatccgaggctcaggagatggaggagcttgcagctagcgtcgccgaagacgtggtgcctagtactaataccgtcggcgagaccaaggagccaaaagcgtaccagatgctggagtcgcgcgtgccgtcctctcgactaggcagactctggcagtacggtggtctagcgacctcaatggcatttggcgctgtcggagagggtttgcggcgagccactggcagtcaggacaatggatctattatgttcagtgctggtaacatggagcgaatggtagccaagctgtcaaaaatgcgtggcgcagctctcaagctgggacagatgctgagtattcaaggtacgttgcattgtctagctcactggtatcaataatgctcatgcaattgctagactccaacatgctccccgaaccaattcagcaagtcctccaacgcgtgcaagatcgcgcagactacatgcccgcctcgcagcgtgacaaggtacttaccgacaacctcggacccaactggcgcgaccttttcagcactttcaacgaaatccctatggcagctgcctcaatcggccaagtgcactcagccgttctcaaaagcaccggccaaccagttgccgtaaaagttcaatacccaggcgtcgccgactcaatcgacagtgacctgagcaacctctcaattcttctaacagcctcccgtctcctccctaagggactgtaccttgacaaaacaatcgcaaacgcgcgcaccgagctagcttgggaatgcgactacgtccgtgaagccaaagccgccgagcacttccgcgggctcttagccggcgactcagtcttcatcgttcccgagataatcgcccacgcctccggcaaacaagtcctaacaatggaaatgctggatggcgtagccgtgaccaaagtaactgacttcacccaagcccaacgcgactggatcggcacacaaataatgcgcctctgcctccgcgagatcaccgaattccactacatgcaaaccgacccgaactggacaaacttcctctacaactcgtcgacgaacaaacttgaactcctcgacttcggcgcctcgcgcgcctaccccgaggaattcataacaacctacgtgcgcacgctagtcgccgcctcccgcaacgatcgccgatcctgcaaagacctctctatcgagctggggtacctgacaggaatggaatcgcaggcgatggtcgacgcgcacgtgagctcgatcataacgatcgcggagccgttcatgctttcctcgccggatctgtacgatttcagtaaccagacgatcacggaccgcgtgcgcacacttattccggttatgattcgggagaggctggcgccgccgcctgaggaaacgtactctctgcatcgtaaactgagtggggctttcttgctttgtgctagacttggtagctccgtgccctgtaaggctttgtttagtgaagctgttgaggcggcgcagcggaatgggctaaaggtggagtagagagatgtggttatgtactattatagactctgtataactgtatactatatagtcagggaatgaatcctggattattttggttatgtcaagtatcaaaaggatccaggttgtctcgtaaagttaagtttgccctaataagtgccaagagcgcctcccgcacgcggctcaacaagacatgatggatttaatctatctccacaccatacaagatctaagctacgattaaagactcgggcaataatatccttcggtgaaaaagatttgatgaaactagcatactctattctttcggtaccaaaacaaaggaacgatatcatccttaactagaagcattgaagttatccaggaccgcgtcgtccttgatagtttcccaaataccgtcaattcgtctcacaactccctcttcaagaggacccttccgcagaatagccagggtgttcttcagttgagacacactactagcacccaccacaacagcatcgccgagcgcactttggatttgagagtggaaagcgacccagcggtaggccaactcagccttcgaaactcccgagtccttggacagttgatcccagagatcaagcgcctccaacaagctgggggtattgtacagcctattgtacaattgacctataggggtgctggaatcccagcgaccttgtccgccgttgagaagtgcctccttcgacttcgtgaggaaaccgcccgcaatagggctatatgcgtagaaccgaatattgtggcggcgcaggacggggaacagttcggtctcgatcaggcgcgagatggcattataattcccttggtagaccgaaggaaggacgtaacccttttccttgcagatgcggataacctcctcgacttcgtcagcgcggaagttcgacagcccaaagtagtggaacttgtgtgcttggtagagctcattgatagcggcaagggtctcttctagaggaactttgcgatcaggcgcgtggaggtaaaagatgttgacctaagaccattatcgtcagcatcggttccctacagtttgcggattgggatttcctgcacatacactgttcgtgttcagcttccggaggctctcgttggctctttcgatcaccagttctttggaagacgttccaggcacgaagccaccagcgtgcttggtatcgacgataaagcgggaagcggcacctgtttggcctaagagctcttcacttcctctatatatctgggcagtatcgatgtccttcacaccattctcctcaaggacacggaggacttcttccacctgcgccggggtggaaaagtcactagaagcgccgagaagggcgcccccatataccacctttacttgtttgtcggccattgaatagatatgaacgaaaaagggattgcaggacttcaaagtttaatgtgaaagtaatgttgagaaagtgtgataaagacaggctcagatatctatatataccaacacatgcgagataaatcacattagtaatacaatcacaagtgctctaaactcggagactttctatactgctcggtaagcagagttgtcattgaaccgaagccgaaggccgaagtgattcagatctctttgtagcacgtatacaagccctcgttccaccctgaatgcccgtccgcaaatcagaaccgaatattgaagggtgtggatccctttaacgcggccagacggacgggacacggaaagtcgtagggaaaacgggataagcggactttgacggagcgcagccacattttgtccgaacaccccaactcctacccaaaattacatacctccatatgtgagagcccgaaacttcggccgaatattctgtttttcaaggcgcatccactaaagcggccccgtgcatgagaccaactccgttctgatgaaggtactgactacgaaaggaggaagtgatcaaccgtgagtgagaatgatggtagatgacggaagatggggatctaggtactgtcatgaagctctcgatatagcttcgcgctataaatccgccagaagccagaagaaacatctctcagacatacaaaagaagtgccaacgcagcaagctgaacggcaagctgcctgtcggagaagtcaaagaaaagggaaggaatgccacagaaggtctaccaactgtatagggcaacagcgagcacgtcagaatgcatcacgttctgagctcacgggacagacggactctaacggacatgactcggactctctccgacaacgcaattcttgtcataaaccacatctaaaattactcaaactaggtgggtcggagatgaccggaaacgagggcattgtcatgagcatttcattataaataaagacaccatgctaccccaatcgtgcttcagattaatcctcatccttgcaagtcataagttatggttaccaacacccacaaagtatttagaagggatggagcgaccattcgttcccacatcgaaccacgtccgcttcatggcccatcagaagtccttgtcaaagtccgcgcggtctctcttaattggaaggatgtggcagtactcgacggtcgatttccctttccagcattggaaaatggcatctctggaactgagtttgccggggaggtcgtatccgttggcaacaaggtgaaatccttcacggtaagttcagtctagggtcggtttgtcaagtccgtggcttctctgactcgtttttattctttaggagggtgaccgagtaacatctttgattgacttggatgctattaccggaagagaaaaaaccgtgcaaggtttgtttgtatctaagcccggtatatatggtataaagtcctaacaagcacaggtctgggccagaatatcgatggaacattagcggagtacctcgttatgccggcggaaagccttgtgaaaattccagatcatctgacgtggcccgaggtaaacattataccagaaaggaagactgtgatttcttggagcagagctgacgaaagaaaataggcgagtatgatcgcgtgcgcaggattgactgcatggtcagctctcaatatgaagagctcgaacctgtgtgggaaaaccgtgcttattgagggtatgaatcagaaaaatcacgccaaccaaaggcacaatggctaaccttacttatgcaggaactggtggtgttagcctcatcgccctcattctcgccgttcgggctggtgcttatgtgattatcacgtcttcatctgacgacaagcttgagaaagcacgaatcctgggagcttcgcataccattaattatgccaagcatcgtgactgggagaatgaagtgctcgaacataccggagggctaggtgtagacatcgttgtcgagcagggaggagcggctactctattgaagagtgtctcgacggttaaaaagggtggccaggtgtcccaagttgggctgcttactgcaaatagtgaaggcgatttcgttttgctagtccagcaattgatcatcaaagcttgcaggatcgtgtgagtagtaatccctgtgttcattatatccaatactaaccgagtcagaggtatccaagttgggacgaaggttgacttggaagactttgtcgagcttttgagagtcactcgccttggactgttgccggttatcgatcgaattttcgaatttgaacaagccccggaggcttgtgcatacctgcaaagtggtaaagcttttggcaaagtagttgttcaattctaattgcataacgttctccactctaccagatatatgaaactacacaagaaccgtcgcgacgattgtaaggttccctgtagatagatattctcagataaataaataggtgttattgagactcttatgagaaaaacacaaaatgcctagatttctgtcacctaggttgggatagagtccatgattcgtcgtgccgctagaagttccaaatatatccctggagagacgttagctgaatatcaaaagcaaacgacgtaccgacaagtaagaacataccagcagatttccatttcgcgttgagtttttccaatgctgtttctatgacacccaagcccctcaattgacttgtaacaatgaatcttacccctgccaaataaaaccaatgcaatacaaatggcgggatatcaccgtgggttagatccacgctctccgtctccatatattcttcagctacggctagtgcgaaggaggcagcatcattagaaacagcgtttgcacgttcacgaagattcggttcctcatgagaaagatatggggcataaagcgttaggagggcgcttttgacaacggttagtcagaatgtataaaatgaattgtaaaaaggaaacagagggccgtcaaaaatgagtaagtgggcatgagagatacctaccaaaatgagattgcagtttggtagcatataatggaataagtcgtgcccgcattagactctgaatacgagattaacgcgtgaagggtcttctccagctggctaacctcttcctttcgaagttcaatgtcaatcgacatataaaggtcatggagaaggacgcggccaaggagatagccagcttgcacgacgtttgcgtagcgtccgagtgactcgggaggagccgacaatgtggagaacacatttttgtatcctccgtagtcccattccttctcctggcaaggaagctgttctgttaaagcgggctcggaaacaagcaactcctgtcgggggtttcctaggttcgcaattctgggcgagcacaaattaatcaaactgtacatatggggcccgtgccagattaaacaaaccgctcaagcatgaagatagcccaccaggttcttctcctctcttccgcttcaacccatggtgtatcactaataggaccatctaccgagctagtccaaccgatacctaatgcaagagaatatttcaggcagagacctattgatacctgcacggcaggatacatagcgtggccaatctcataaaccgcgaggagaatacaaccctgtagtgtctccatggaaagaataccggcaacttgcatctcagtaaacagccgccttatagtagagtacaatggggtccacgggttgtcgttttgaagagggctgaaaagatccatacatagacacaagaaaacagcatcagtccgcaggggcgacagcggattcagcaattgatcgtaaaccttccgttttgatatgattggcagccatggatgaacacactggtaatagcgagttgctattcgttgtaggccagtattatcacccataaatggtctcacgtaactcgggattaaattggggacagggagaattgataaccgtgctttacttcgttggaagacttcatggtctaagaaacgacaggccacactggtccgatctcgaggactctgcccgggctgcagcgcaggtggctcctcaacggtaattgcggtggaggaagtggtattctgatcacttattagatcaagtgtgttgtttttgtacgagcagaccctctggtgtctgggaacattagcccgaattttgattggcagtgttctgatgcttaccgtttgcaggcggaacactcgggcgtttccctattgcatttgatcttgcgtttatgacagaagtagcatgcccgctgggcacggatggggtcattggtagcctggtctgacatagtttcgagagtgtcaggcacaacttttaatgtttctcatcatagaacgggggaaggacggaaaggcgggggacacggagaagttgccacccctcacggagaatttccgagatattccgccgggcccgccacagcgagactactctagcaagttcgagcttacgatttgtcagggattcctcatcgatcatgatacacattcgaaaattgttctaatttggctcttgccttgggcttccgcccatatttcagaataggtgcgaattgatgtagttatcgtatttcaccagaccataaggaagaccaagtctctggtctatacgaccttcttaaagtgtagtaacggaagtaaaaagtcatgttttttgcgtaaactatggatccgctagctgccaaagccttgtaggcgacctcgccgagaggatcagactcttgacttaacgatgatgtcggagtatggctaggcgcctctctgccgaattggttgtatcggcgtcgacgggcgttctgagtatcgtctatgcgatctcaccggtaaggggagaattaccctagtcccggcgttgtgacgtgccgggtcttgtcacttgtaagacagaagattgcaaaacaatgcaaactagaaaacaagcaaataggcaaagcaaggcaaatgttggatcgtaataggcgcgatgggttgcgggggcagactgccatcgtcccatgatatgctgactctgccggcgtgcatagtctgcggcgcgcatagcgaacatctagtgatctttcggtctgatatctgctgataacctttttcttcaaggcagagttgcatgatatcttcatatatgaacgaataacggcctggcaaggcactcatctcgaaggcattcattttgagagttgtttgcggtatcgaattgcctttgtagacaatcaaaacgaagaagaacataaggagagaaagagaagagaagagcagagaagaggggctgtttacacagtccctaggtttggccagttttgtgcacgtcccatactccactggatcctcatacactgaagcatatgcaccttggaagggaccccagtctcgtcctataatatatgggctgcggtatcagctcgtccggggaatatcgattgcttcgtcgggctcgatgtcctcggggctgaagatcgttgaccgggttgatttcttttcttgctcgaccttttctttctaggagtgacccgaagagggagagggggttcgagactagagagcggtggtgttacagaaggtaagtggaagagaaggggatcatattgtgtatttacatacatggtcacagatattccagatcagtgaagggagtatcacctgaaggaacaaacagcatgatgagcgggccacgcaccgttcgaggatattgccagataaattgtgcgagtgcgtttgtaaggtggtttttgtttcctgctgtaggttgatttcgtgggacatgagacagtctcttggttaacggcccacatcacctggctccgccattgtttctgatgacaagaaagaaatcgaaggtaagaaaatctttttcgttgcgtatagatattcgttaaatcggctgacacgctcaccgtccgcgaggatgcgactgcggtagcgaaaggcacggcaccagatatcttgcaagatataatggttggtatcaacagccaccgcaggaatatatgaaacatgacgactagatagccatgataatggtatcggacaacccctttcgtttgactgcgagctatgctcgtcttgaggacgcaattggtgataggattgagctcccaaccccatatataggtgtggatgttgcgtatatatgactcatctgttgcatgattctgcgtataccaagattagttaatacttttgaatgagacgatcgatagtatataactcactggtgccatttgaacgaccaggatagagagaatatctctggttgtattatcattattcattgcgtgtcgaggagacgactgtggtaagggattctctagagagagatggaaggattcgctctgcgtgaagtatatttgtagtctcacaagagcggtcggccactcatgcttttccatatataacatgttatgagtgtgtggtcactcattaagaagtatgcccctgatatatatgaaggcaaggttgtagagcgagggtaaagcgaaggtaaagcgaagaaggtaggtgaaggcaatataaaggtggtgtaaagggaatgtgaggacaaagggcaacatgaaagaaatggattgtgaattcaagattcgtggttagcgctaggccgcgcggttgctgttcttttgggttatatatgttttacacaactgcagtctgtctctccaccttacttctcttccttcctccccacctcaccaccagcatcgaggcaaaatgaagctcgcctatccaccgtgggtgagaatatcgacgatatccactcagtcacctggcattacgcaaagtatcatgcgaggctcctcctgagcctcgcatttaagctcctgcccagcgtgtcattcaagctcctgttgttcgccgcgatgcgttcagtggtggttagaatttctgagattgcagcaccctggctatgccaacctcatgattgactgtgagcggatatctcagctgtccatagaccaggatatgtcggatctaatccctccacatgatcaaccgactgatcctgaggagccgatagtaggtgagccagaagatctcccgacccatacggacctggaaggcgagtacgtggctgtaacgaatcttgaaccccacttcgacgaggagacggtacttcgaaatatggtactaggcgccattcccccgcctgagcattctccagttccatcaacgccacgccggcacattatcctaccttctatccgggtcactcccatttctgccgacatgaaccctcggtttcgaatgaaagactgtgtgcaagttatatgtatatctggtccgatttcgaacaacaggcactagaagcttgtaacaattgactttcaccagtcacgtcagcgttacagattcacccgagggtgatttatactttgtcggtagtactggtcgcgaactgtggctagctggctctacgtgcaagtcgatgatacacttcaaaaaagcatccagaacatggcatacctcccagagtttgctgacaccatgttcgacgagatcatgttgatggtgcaaggaagcgacaaagctgagaacgcactcaacgagaccctgaagttcgacaaaatgcgtcgttcagatttcaacacagcgagggacttcatcacagagtaccaaaaacagtaccacgtcctcgcgcgcttcaagatacaacctcaccccttccatacgacaatagccaagccatcctatcgctcacgttcctgacccttttcccatatggtagggcggagattcaatcgtcgagaatccgtactgtcgaattcaaagagtgggcgcagcacctgatgcgccatgagtcgggccgtttcgctcggcaccctcgctttcgttttgtgatctttaatatgattgctccccatttcagtcaattcgacgaatatctatgcgcaacgaaaaatgtttttcttaccttcgatttctttcttgtcatagacaggggaacatgacacttctttcaataatctggagtatctcttaccatgtatgtagctacacaagaagggtgtggctgaacttgccatacataggcctacgcttgctgaactcgagcctggagagattccaacccaattttcaccctcttccaccaaagccccacagccagacatggccagaatcatcgcgtccgatcatcaaacccctcacctgagactggcctagaagaagcggatgtactgatgagtatatgtcagagcgccccccggtctctccaaaagcccctcgagaggaggcagaggccctggcctctgatgaatccacaaggttgtttgtgacggatgaaacgacgcaacatagtaccttagtaagttctatatcttcgaatcaacaaagtattcacaggtggtcgcttatacaaattacagtccaagggaatgtctcggggatgtgcctccctggtcatccgactagccataacttccatgctaccgaagagaacaaatagccaatttcaaccagtcccttgacgctcatacatgcagttactggaaggccgtgaatcggtacgattgtgacatggagaaggcccctcaagaagaactttcaaatgttggagattgtaatgacacaacagaagagatcgccaaagtaatcagcagagatctggtgctttgaaaaagttcactggctaatcatttatgcagaatagaacatagctcagtcaaagcatactacagactactggcggtggtgatggaggttcaatcaccactaaaaattcccattctgagatcaaaagacgtgaaaatacccagcaaaagaggcacaactataaaagatgatatcgagaagcaggaaaagtacatcggcggcgccagaaaccttaaggcacagttccatgacggggagttctccccagatgatgcctcgagatctctcagaactcatattaatgaagcctgcgagtagcccacctggaagaggtctcaaattgccaacagtagtcgtggattctgcgtggtctgggtcattgaccaattgacggaagattccctattctggctgaatgaatcagaccaggaggtcaaaatcgcattaacaacatcacgaatatcatattcggacgggtgttcttaaagacggggtccaaatttacgataatcaggaggccataaggccattctaggagagacttacggcagataagaaactccacgtcgaagagattccaggtcggtgttcactttgacgatgcacagagctaggtaatttggatattggcttacagctggctgatgcacctggtcgcacttaccattgcaagtaaacccagggaaagaagactgggagcaccaatgtgaaatcttcttccttttgatctccgtcaggatctacttataattttcgacaccatgtttcaaattctataatccttcgcactcggaaaagttcgatctcgattgtggcggaagaaggtgcaaggttgtgttcttggcttagtttagggatcgatcctcttccatttgctagctattacattcactagtggattggtcactcagattggccacccagattggccaaatctcaatatttgtctgctggatcagcatcgggttgaggagaaagggttatagaggaccctggacaatgtcgttactctcgatgactttggggacaacaacctagcagaagagaaggccaacagtgtccagcgaatgatcggcactctgggtgtatacatattgtttcgttacagaaatacaatctaattcaaggtcccattgacggtcatgagttgcaggagctcaatagagcttcatatagtagatatacgtgatgtgcaccgtatcgcgtaacacggtgatactctactctcgacggaaaaggcccgggaagtcgcccgttcgatgaatgaagagcaaatcgaactagacaaggtcaagacgtctcagcgcaggacccgaatgaattagatacggacgtatgatatcgttccagagattttattaaattcacaggctaggtatacgctggcatcacacagttgggttggacatgcagatatttgtcgattcaaccttggaagaatgatggtgataagaactatagtggcactaagtgcagtggaattgctggatttagtctgtatattacgtccgctcacttgtgaaaactaaacaatatttcatggtgaaactatctgcttatatcaacttcgtttaaacaatgccaacaacatcgagcgaagagagccaaggcagaacggtctctagcatatctgacatgtgatagcatccagatgtcgaggtcctccttctctttgagaagtggctccattttgtatagtacgaagcttcccaccgtaggcagtccctcgcagtggtctcctgatggagcttgcatacacagctattcttggatatagtcgaagagccgaatatcgaaacggcaaacggctcagatgggaagaagaaggatgggactcacaacctccattcccaccagcagcgacgggctcgtagcggaacctagccttgttagttactcgataccttcaaagtaagatattgggcaaagttgaattgcataaaacttaccacttggcccgaacgttgtcgttttaggatgcagagaagaagggacagcagagtgagacatgaagtgcggaatgagatgagagagaggtgaactcgaaagtcgagtcaatcaggttctgggctgtggaccagaccaactcagaagtcatcacaaaaggcccaagattccccacaatgtctccgagtgacgagcatgatgctcatcgacaaaacccctcaattcatgaatgttatcactccttcatagagactttaaatcgcgataagacaatagacagtggagggaaggttgatggggtggaagtgtgaattgcacgaggagcttctgttgactgtaataatgtttgtgtatctccctgcgatgttcggtgttctaactggagagattcgcaaactccctctgccactgcacaagggtctcagatcacggcttgctgttgtgcgctctcctcggacataacatggtatattgagagttcgcgctatctcccggaagacgccaaaccgaatatcaaatctgtgcgacgatgtgggagctatcgtgggagatttcagaaagaccggtctagttctcagtagttagtggccatattataattgatacctcaaaataggcatcagagcctgactggtcccacttactcttctgcaggtaggtttttatcatttaagcacgatctgggcccccctcctgcatggatacccatctgtcatggctgtgagatgggcgccatgaaacttagcattgagttgtaatcaacttcccatccattcagctcggtcgattgggggtggcggtgattgtagtattcatccatgcaattcgtcggcatgcgactgcattaccaactgaatgcatgaccggcgaaccaattctggtagctagagagatgtagatgacgcacgaggtcattccaatggaggtcggcagctaagaggactatgattgctggcctgcgttgttcttgacatacgccatgaggtcgtggcggaagactcaggacaatcgagtccagcggagatttagtgggtagttctgcgcactctccagaatcctcttcggcttttcctgattgtcacttgcccttgatgtcttcaaaatctgagggtcgcatcattcatcatgtcatttccataattccaagtccataatcccaaccagagctcatgtcgtgcctggttgagcctagctcatggatggttgtaagagaagacacacaaccatcaatgaccaggtatgtctctataatccagacgcacgtagtcccaaactcagaggaccagtcgtttttgtatgttatatccgaattcgacattgtgcaggtaatttccctttcttgccacaaatgacaagagtccaacatgaagtccgcctattggagtttctgcgtctggaggtcggaagcttgaggcgtagagcgctgtatcaatgcctttcggactgatgccgaggcggagcaggtctgtgggtccgcttgctagttatacatgggaatgtacttgaatttggcgcatcgatgatgtaggcgaatagtatatgcctttgaatgatgccgagaggggcagatgtgtggatctgtctttctttgcttgggatcttgtccgcccagcaaggtccagttcagtcggtggccatggtgcgaggcgttccgtgcggtctgcgttttctttttacggtatatttatgccatttccgagctaacgatcagcttttgcacgatgttggcttcggcaagtccgcggtagatctcgccagcttagctcagcctacctgttattgtcgcccctccagtccgtgcctcttgcactggacgacaagagtttcttggctcgcatttgtccggcctggtactggtacgtatgtagatctgagtagccacgctgtccagattggttgctaagtcggtctatggaaaaggaagacaaagcgaaaggataatcctgaggccgaaggtcggtatatagtcgaaaggccaaggagaaggacacggatgcgatcaacgtgcaagctgaggttgttgttgcgccaaacttcgttctgacctcatagggagaggtgggggcagaggcaggctgcctatatatcttgatctctcaacaatatataattatgaagtctgtgatgatgcctgttagtcaaatatcattgacttgactcttatttctgactcacctcaccacagcagtatcgcggactattcgtcgtcagccagcgtcgaggacaaccagagaccgtctgccaggttcatatataaatcactataaacaagccatggctaaaacgtgagagggcttgctacagggagcttgaaggaagactgcctgatgaatcagtgaaaggaaatcagtgaaaggaatcatataggtgtgagaagaggatggttgtagaagagaggagcaaatagctatctggctatttatatctgggccagtaagcaaacaatgttagactcattactcattgtggtattgtaatgcagacaacaaggaaatgttgaatagctataagagcctctctactagatgctacgtgataatctagaattacacaggcaaagagtatgaactcaagaaatcagagaactgtctctgtcctttcattactagaactaactagcagcgacttagccggccggattgtcatagtaacacaatccaagctagctttgtcgatcatcattccacgtcgcaacgtattcgtaactgtgattcaaaatcaacacgtaagaccgtaggtcaagatatttggaaaatcccaaagaatttcaggcagaggaaagaagagagtggacgtgaggcgtacggggtcttcaagcccagcacgtccatcggggtattgggggatgaaattttataggagatggggagggtagatcggggcgacacgcttatttgaagacgtgaccatcggcccactccttaacttggccgtcaacagtgacgggaacgtcctgggaccacatgtcctcaacgagcttgcggtcagcctcgttggaggggtcgagcttggtgaactcgtaaccctcgtagtcggggccgacagtgaaagcgggctcccactcctggccgcgggtcatgtaggcaccgtagacgacacagttgtagttctcgccgtaaacggactgagcaccgaagaggtacttgcgggaagcctcgagacgagtctggaagccaccgatcaagttgttggccatgaaggtgagcttgagctcgttgttgtaacggtagttgaccttccagagagagtactcatcggcgttgaagtgctcccagaaccagggcatggcaacggtgcgggggtcctcgttggagaacttgcgcttccagtcatcgaggataagagtgggcttgccaagagcctcaagggggtgcttagccttaggctcagcggtagaggcctcgacgggggcggcagcggcgggggcagcggccttgggcttgggctccttcttgggggcgacgtacttgacgacctcctcagcgaacttggggctggggacgacggccttgaaggcgtcctggttgataatagtgttgtaccaccgggtggtggcggggttggcctcgcgccaggtcttgtccaagacagtggcgaaagcacgggtaaggagggaggcagcgaagatatcggccagagtgatacgctcaccaacaaggtaggtgttggcagtgaggtgagtctcgaaggcggagatggccttcagggcaaccttggaggcctcatcgacagtcttcttgttgtaaccatccagacccaacaaaggacggtaccaggcaccgaacttggggagaacctcggagttgacgaaggacaaccagcggaggatggaagcgtaatcctgcttggtcttgccgagaagggtggtcttctcgttctgggaggtaactatgaacaggacgtgttagtcaagttgtttgaaactcgatggatccaacaatggagcaatcggaggtgacaatggcaccatatgtccatttcaaaaagagagtggggtggtcgagtccaaattttcccgcagagcggggtagccaatatttttttcagagttgttttttctcaacagttgttataacaatagttataattcagacagggataactaatggtgtctcatcataaagaagagaggcataaaaatggaccgaggggtgtgtggtgacgcataaaagggaggatattttcacataccatagacggcaatggcaatagcctcagacagagtgaagccattggcaccctcgaaggcggggatcttgccagtggggttgatcttgaggtactcagcgctggtgttgaattcagcggtagagttggcctgggtgttaaccagctccaagtcgaggtcgttgtgcttagcagcgaccaggatggagatggtgcgaccgttgtcctagaaaatattagacattgcatcaaaataacaaagacgaagataaacatacaggcagaccgtagagctttccgaatgccatattgaatgtaatttgtggaatatgaagggaaaagaaagaaggaagagaaaggagaggggcgagtaagaattttgtgctggcgggacgacttcggtgctcggaggaactgatattgccggggtcacgtcacatgacccgacaaaaaacatgacaactcggagactatcaacggcctccatccaggacctcaaatccgcgttgcagccccgaattccccgccaattccaccagccatggcgtggcacaaacccaccagcctcgcacaggcgatgcaatcactccgcctaacctcaaccctcacaaaaccctcaatccaagcctcccgaacaaccctcaacaccctccgcacacgcacctacgcaacagaaaccgaatccgctccggcggccgcagccccagaaatcaacttccgctccttcacccaacagcccgcccgcatcatcccctcctccccatcctacttctccggcagcccgcggttcatcgaccacgtcctgcagctggaagctctgcaagcgaagtacgccgcactccctacagtgcccaccagcgaggcaccccgcatggcgtggttcaagctggcgcagttccgcgactacgtgggcgagcccgtgcccatgaagaaatacaagtctctcgtcaagatcctgcagcggctgaaccgcatcgagcccgaggtgctgcctaccgaggtgcgcgataccctggctgcgttcttgcgtcccggtaacccgtatgcggtagagactgtcccgcgcacggtggatgagaacgggcgcgctcgcggcaagggaaagaggaaggagtctacggctgttgtgcagcttgttgagggtgagggtgaggtgctggttaacgggaagagcttggtggaggcgttcaagcgggttcatgatcgtgagagtgcactttgggcgctgaggtgtacgcagcgcttagataagtacaatgcttggattcgggtgaagggtggtggtgttactggtcaggctgaggcgattacgttggctcttggtagagctttgctgttgcacgagcctgggttgaaggcggttctgaggaagggtatgtttttccttccatttttgctcatttctttgttgacgcagttgctaacttcaattcctttacagccggtgcaatcacagtcgacgcccgtcgcgtcgagaggaagaagcccggtcacgtcaaggcccgcaagatgcctacctgggtcaagcgttaaagtggccagcgaatcctatttcctttttgtttcaatactgtattattcaccacggcaccccgagttcgcgacttgttttatatcctgtactctcaatgcatatggggcaacaattctaaggtttcattgaatttgaattgatcagcgtgttgtatattcacttacacctagagtccacggtcctactatctttaaataggtgttaataagtatgtatggactgtgtggtaaagtccatcttatacaccttatctttcttgccgcttcttcgcacgctggcaaaggccacgaaagagatattaaaatagatgccggtaaggccagacgccatcttcagttatggacattataaccgaccattccgcactaactaactagagcatgcatcgagcctaacaagcactaccgattttacctaatgtggcttaaacatcgaaaccctgcactgggaaatcgttcgtaattgatatcaagtactccgtaggtcgactctgtctgagatctaatccttacaagggtatactaactagcgaacgaatacaaataaaaagctcaaagccaagacgagcctttgacaccacataccgaagcaataagcagcatgaactactagaaaatgaaattaaatgaccccaagccccaaatccaagcccaagcccaattccaaaacgggaacacaaaggtcccgttctattttttgcgccagatgcccttgttcctttttgtgacgccccaatgcaaagcctgtccgatacatagaacagagataggataggaaattataaccgaagccaatgaaccatccacagaaagaagatcatgagactatgtacaactcgtcaaattcgtcattatggtatataagcggggaagtggaagactgtgatgattgtgatagtggccgtggttggagaatgatgaggtgatagtggccgtggtgatggcgaatgatgaaaaagtgacagtgatatttcgcgccacctcgtcagcccgagttgaatagacgataggtataatttgaaaagatcaagcgctgacagccaagccggcgaatgatcgcccctcccggaagaccgatgaccaaagacggaaggagggggccggtcgatctctcatcaaaacgaatgcgagagtgatttggtgcccaacacgaggggagaggtgatagattacctcttcgttgtcaagtatcaacatcggggttggcgcgacgctagtaggcaatagcctccccgtggcggcagcgcttgggtgatgggtcaatgcgtccgatcgtcacggtgcagccgtgtctttcccttctgggagacccgatttgatgtgacgtgagttatttggtttttggcgattttctttttttcgcttttctgctcgcctttttccgagggacttggttcatggtcgaggcactgtcgtggcttcgggtctgacagggatgtggtggaggtcgggtctactgtccatgagatcaaggcattggcccaagactagttttgggatgattaggatgtaatagaggtgcatcggagtatagcgcaaactcaccggacaggatctcttcttcccatatgcccatttgataatctactaatccgtgaggctcaagttgatcgcagagctgaattaggtcccttcccatagcctccagtcggtctcgtcgaattagactcgtatgcgcaggttgttgaccagtcgcaatcacctccagcatcagatccttttgcttttgacatatggctagccaacagagattgaattcgctccagagcttcaaacgctcggagtaatgggtgttgtcgtcatggaggaggcctacgtatcaaacaaaaaggattagcctctcactgtagatcatcaaggtatcgaatgatgcttgcatgacacgcctgtaagcttagagccaaacattagggggcaaagagaacaagaaaaagaagggtccagttgagagtgcggcttctgtgctactaggcgagggcacgcatagtaaccctgtgaacttgttcctctgtcttctccgaaggggcgaaaaaaaaaaacgataacgctagcgagaagactgcatcttaccaagttcccgtgcattggtcaccagccactcggatatttcaagcagcgaccctccagcctctaccaatcttccggctcgcgtttgatcgaaagtgtggcacaggatgcgttgatatcgtccgatggcctcatccaggctaggctgatccgacggttgggactcttgttggggctgatccactctgttcatggacccggaaccgattgcagcgaaatcagagacgggtgcagaaaaggtctgggtggtgttcgggcgtgccatggggtccgcttggttataaggctggagttgcgcatttagataaggagagagtcccgcgaccccagaccctgcagattcttctggtgcaaaatactgtggaacggcaaattggttcgacaggacatcaatggctgcagactgccgtgtctggtactgtggcacaacctcgaagtgtccctgggttggaccttgctgaccgaacccgtacagcatgttagagtcgtagggtgggaatgcagcggggtcctgcggcggcgccccccccccgccgcgccccgtggctcnnnnnnnnnnnnnnnnnnnnnnnnnnnnnnnnnnnnnnnnnnnnnnnnnnnnnnnnnnnnnnnnnnnnnnnnnnnnncatgttagagtggtagggtgggaatgcggcggggtcctgcggcggcgcgcgccgtcgctggtgttgaatagccggcgcttgttgagatcgttgagctcgtacatagtcctggggctgatagttctgcaagtcggttgactgcagggaaccgccgtggaaggagctgcctgtgtatccgtagtcgtaggacatcgggacttgctccgggggttgcgacatccccgtttggtttccacgtggtatggctgggtcaaacccatctgctgcacgaccaggtggtctgcgagcatttccagaccgagacattgatctttcattctgcttcatacgtcgatcgccatccatgaggctgtcccaggatcggtgcagatcaagctcagcccaatgcttgggggacagcggtgggcttgcgtagtatgccagcttggatgatttctgagggggattccagggaactttttccactgaaggcttttcccctagttgggggtgggggagagagagataggagggaaaagaaggatgagacgtaatccttgcggttcaagtagatattcaaatcttgtcctctgacgcagccgcgacacagatttaagtaacagagaaaacaaaatcacacaataattgaaatggaaaataaagtcggccaaaaaagtagaaggagaacaagggggaaaaagcagaattaaaatgcaattaggcaggaaattagggcagagtcaggtagacggagatattaagaaagaagagtgatggatctgaaaagaacaagatggtgagctgatcaaggacttgagtagtaagatagatagatcgagtatatgtatagtccagtccttgaatgggtctaatatagtataagaagggtataagggtaggtataagagtggatagtataagtaaaaaaagggaaaccaagggggaaacagaagaaactagggcttttcccgggaatagaggcaaaatataccccaaatagcaagtagcaaatatcccaatctcaaaatctaaaacattaagccctaaagccatataatatgatcgacgatcgaggatctacatctaaactccatttggctcgggaacccggcgcaatggttcttggcctcgagggatttggggatttgcggttttcgacatttattgcatttcttagcttgttttctttttgatttttgatttttatttgtctacaagttcagctctcgatgtcaggtgggatactttcctttcttttttcctctctgttcttcaatttatagtgtgtaacaccgtctatgttgcctggggctgatcatgaaggagagtaaacatgagacaaaatatcctccccttgcgtagaatgtagaaagggtaagagatgagaaaaagcaaaagtcccaaaagtataactaaacgcagctaaacgcaactaaacaaaatagttggaaaaaaggggatgctatttacattccggggagattagccgggcagctgctggaacctcgcggagatgcatgatatttgaggctgacatgatagcataataattaataatagtagagcagagaagatccgtcatctgattgttcatatcttatacatacataaaactaccccgtgcttaatagaccaatatcaatcaattcaaatacttgtggagcattgttcgcccgattggatctgcaaagccctgacggccacctacatacgtcagtttccttttcctcgggtttctgattgctcaggtctcacgggaaaagcaattattaggactatgaagtactggacaaaggtatttgtttatgtttactccgtactccgtactatttaccctaaagggtccctgtcatcttccaccctagactgaatccgacactttggttgcgatggctattactgcggatgcgacatcgaagatccgctggtttttgtgaagtaattgtttatacttctcccccggagatgatctgcctacactaaccttagctattaatatttaacctataaagtacatttctatgtacttggagtactccgaactttatatactacacagtatatacttaatactgccgtatcgacagatcggatcctctaactgaacgaaacaggataggatcatgcaatatgcggaagtatacatgaataaaataattaattaattaattctcttcaagaaaaaaagaaaggagaaactattgaaaattaaattcaaccgttggacagatagatactcgcgtatattcggacttcaaatcacagttcctcttgatatatctcccgcaaccaggtgcccgacacgttgtataaaccatttggtagcacaaaacacgaggccggaactgggtattatgggcttggatatttgcaatgggacctaaaaaagggagcaataatacattgttattgttgaaacaatggccttttggctactccatgtatactgttatcgaactatatctccatacctggagccatgaccctgtttcaggtctagatatcgtcaaacatgtcagacgaaacatgcactaatatctaatcttagaatcccaaaaagaaaagcatggaccgaactcttcttcacactcttaatcccatgaccaacagactcagacagaactctggaagggtcccacctgaaacacgacaaacagactattactacctacatcggatgttttatgtagacagtaagtagaccgaaagtaactggacacccccttcttcctttccttcccttcctctcctctcctcgtaaataaggaaattctattaaaaattaggaccattccctcgaaacaacagtgcctcgccttgtgcgacttccatctcggactgcagacccaacgaatccagtgcctcggaattccgaaattaccgtctcaccacgcttatccagtccggttgcccagtcaggaccacacacgtcgccgagacgggagggtgagcgtgtagataagtgtggaattacaattagcatcaaaggttatactacatagaaaggtcgatttcgcaaattaagcattttcccgacttttcgtctacctaaaaacctaaggagaagatatctaaaaaaacatatgagactaccatcgagtcaactagacatgtcattctcatcttagtgacgaaggctggtattatggatatgtgcagagaacaaatgtatacacagcgaaagcatatacaatctgcgtaatgaccctacttacctagacggcaatgtacccacgcctacccaacgatatctctcttttaaccttttaccttccattcctccctatccataccggcgtggacacatgcacagactatatatgtatgcagacagggatgggacgggagccagggtccgggagaacggcaagaacaacatagaacagcagaatgggagcgggggtagtttgtgctgccaaggttaaagcaataataagatgcaatatgcaccacctctacccgcaatgtgctgtgcaaaccgacaaggatctgtgactgtggctgctcccgtacccgactcgttggttgggagtcatccggtccacgagactgcggtccagagggaaagggatgttcgagggaggggaactggtgtttgccgaggttagttcgttgcgcggaaactcatggttggtccggatgggaacgggggttgttgctcatgcggctgaaacgtcaaagctttgttttgggtctttgttgttagagttgaggttgagtgaagcgtgtgctggccagacaagccgatgctgatgtgaggtagggaccggggtgtgtgggtgatttgtcggaggtaaagttgttgggttgtggaaggggtcatactgtacttctaacatacttgagtctgtcatgcatataccttccagggtgacattatgccctgccatgacactgggtacctgagctgataggaaaattgacacccggaacaaagaaagccgggagaagaagtcatggggaagataatttccatatgtccttcccatattgggagaaataaactacacgcatcgctgatcattgagtcatgtcatgtcgagaccaagaaagagaaaaccgagcaccaagaagaaacaccatatcgccactcaaccagcgagtaaggcaatcatatttgatctggaccatagttagcacgaagacctccaataagaaaacccggatcaaaacatactcagtgtcatactgatgctcacgtctgtgttctccaccatatccgtgaactcctcgaagctaatctttccatcctgatccttatcggcctccataatcgtcttgtcgacgatctgctgcagctgcacgtccttgaggttattgccgaccatcatcttcagcacaatgaagagctcgccgttggaaatgtaaccgtcacggtcaatgtcgtacaccttgaatgcgaatcgcagtttctcttgcttgttaccctttgagctgaatgccgacaggcccgtcacgaattcctggaagtcgacgtcaccgccaccgtcttcgtcgaagatggcgatcatcctagcataaaacagttgggtcagggactagtccgtgtatatatgtagatcgcagatcgtaggtgggagtttggagtttggatgtggatgcccagggagcaacgaacctcgtggcgagtgggttggacgacacttggggaagggagaggaattcatcacggtcgatagtgccgttggcattctgtagattgttgagtatgttagagcatattctcataatccgcgcgacgcaactgaccttatccagcttcatgaagcgcttgcgcaggcgatccacctcatcccggttgactgtggtcgcgaagtcagccacaagcccgattcatcgccttcataccctatccgaccggggaaaacatacagttggatgtagacacaatgttatcgaagagctgggtggtacccacggagccgcggcgtctccgcgcatcgtaaatcgcagcagcgttgggctcgttggtggagggctccatgttgggtagttggggagggaaaggagatgtaagagagcgaggtacggtggcgagttatgcgataaatgtagcaaataaagttgtaggactagtggaacagcaagtaaagaagggccagattaagcaagacagcaaaagaggaggcgaagggttgtttattgccaacggcccggggaatctgatatcgcccagccccgcactaaccggaagcggacaggcaagcgagcccctgaggccgtgcactcggccaaaacaggccactgccggctgacattacaacgtcaacccaaccgctagccgtgaatcacctcatcttcagtcgtcaatatctccccccctccatcaaattccatctcaaaaatacgtctacgagaaagcgcatacacagagctttgtactgattcccattttaccccgtccccgcccatggtcgttgccctattgcgcgttccgacgctatgactcggtacgggggcctgggcaggacacgccctaaaaagctcacctctaaggcatctattcccgttgtccgggagtcagagatcgatatcatcgacgatgaaatccagagctctctacagcagatcgaaaccggcgtcgaaaaggccgaggagtcggtgagtccctaattttagcctcatccccatccccatcacgtgacatcatcacgagattttcaccccaatataaaatgagtcgcgctgaccttggatcgggttaggaaattcacctgcaacgtgcaattaatgccactgcccagggcaaagtaaacgaggcacacatccctactcccgagaccattctcagtaatcttcaatatgacgaactctatcctcccatcttctcgcagcctgcgacgtacattcgcttctcctcgactgtcgaggattgctgcggatgcccgtacaacatgacagaggacgatgatgcctaccttaagctcatgaaccagaagcgtgatccatctgctggtcgttgcacagaggatatctttgaggaggtcatgaatttcttcgaggagacggcgcagataaagcagccttacgcagccattgataatcccccggtgttatcctttgcagagatgcaggacatgatggatgccaccttagaagatcccatgaagatatttgccaaggagatatatgagcactggaagtcgtgtcggatgtctgttcagaataacgcaattgtaccgcagctcaaggtacgttcttttcccatgccaatgacaagcaacgtcactaacttctccgcagttcgaaactggtcaagacaccgacgacagtgatccatttgtctgtttccgtagacgcgaggttcgccagatccgcaaaactcgtggtagagatgcgcagagtgccgaaaagctcagacgtcttcgcaaagagctggaagatgctcgcgagctcgttgctttggtgcgccagcgtgaaattgctcggagggaaatgctctccatggagcggcacctcttcaagcagcgtgctgaggtcaaggagatgaagcgcaagctcaacgtcaaggacgatgatgaggacctcatcaaccaaaaggtaggcggcgttgatactgtggttgctcaatatatgcatatgctaagcaatcacccacagccgaaaaagagagcgctcgatatgccagctcaacgtcccaatgcccctcaattgcgcatgcctctcaaggctgggcaaggtgcagaggatttgcaactcctggaagacgtgcaggccgaaaaagagaacgagattctgcgcgatatcaagcagaacatcaccaagcacatcaagtggaacgagggatacgtggatcacacccgtgcaccactgtctccttctccagaaaggacattcgatgtggctaccttccgacccgcattcacggcacagttgcccactcctccatcgtcagaatcatctggcgagatggagacctccttagacgtcactagtccgctattctctaaagacaagcgtgcatcgcatgacatggagatgcacgacgtaccacaccgaatgccatctttccgacgacgagttggacgtggtggtcggttgatgatcgatcgtcgcaacatgggagcaaataaagttgagatggacccactcaaggccgaccgattcaagtttgaccaagaagattccgacgaggaccacgattatgacacagatgcgtacagcatccaaatcatgcagcatcgggctattaccatggccaaggcgcgcgaacaggctgcagtggctgcccaggctcatgcgcaggcgcaagcacaggcagcccaagcccaagcacagcgccgactgctggagcaaaatggtcaccaaggctctatggggtcgaacctcggaccaggtgccgtgacggtgtccgaaacctgaatgactcttctcctcttttctcttccacagcatttggcgggcgttttcttcgtggctctggcttccctcgtggctcggttcccttcgtctctttatccttttttcccctttaacacacttgtagttttattaccctatcatgtttcatgaattccgcgggcgggctggtttgtttcttctttttttgcgtttccgctcacctcctcctcacacatctctttcttgacatttcgtttcaacgcaggtgctagccactcatggctaagtgcgtctgcatttgttagtgtacatagtatttttttttctcccgaatctcggtggtgttggctggtgtcgggcagcctttgtatgatggataaccgaagttatgatgcaagcgacgaatgggagggcaaaggaaaaggctcaaaaacattcagaaaatctaaaacaatttaatcactcgcaaaaagcacttttttttggttctgttggggttcagtagaacagactgatatcggccagagtaaatgcaagcaagagcaaaaaaggggctcacatcctctgagtcttggactgtcgcgattcatcatcatcacagttggcagaacgtttcaatgaaccagaagtagcgggctgcagcatgcccaagacagcctgcaagacctctttctcgccaatgcggacctgcaatgccatccgtacgcgacgagcggcctcatccacgtgaccggattcaggcaatggagaaagcgaagctctaaattggaggtccgaggccaacgacgtagcatattgtgcctgtcgcttttgcagcgccttgattaagatggcggtcgcattggcgtccaaaactggcctgggagccttgtccttagccacgcgctgtttgaactcctcaggggagagagccagcgtagccagaaggaccaccaactcggctggcaatatgtcttgcaaagacgggttggcgttgacgggtctggggatcacatagccgtcctcgaggatgtcgtgacttgagaggaactctagtcggggttgggactcggtatctgcgttcgcaagccctgcggcttcgcagatagtttccaatgataattcaagtacgtcgtaaacagcgtagttatcggtcacataaccgtaccggcggaggagatctgcacgggggatctctccgtaatcattgaagatttcctcgccttgttgaattggcttgattgccttcatgactaaggcgccttcttcttggtacagacgggcctaacaaaaggggttaaaattagggttgaaaaaaaaatttatcgtgtccaaactcacgttgtttcggtcagcatcggcgttaaggagatccgcgagcggcaccaaccccttaggcagctgctcttcctcttcgtcatcagtcatgtagctctcctcattggcctctccttcattgtcatcgtcttcggccttttcaatgtcaaatgcataggccataatgattgaccccatgacatggcccacttgaatgagggcagtgtcaccagcatcaccttcccaagacttgagaccaaaaggaggcgggaagagatccggcctctttgccaaaactggagcgatggaatcccgaattgactcctcggcgtctgaccgaccaattttctccaaaatagtactagcctgcagctcctgcagctcggcgggcgaccaaaacatcagggtgtcaaaacgagagggcaaaactctgaaatatggagcccatcttgacttttctccttgcagatattcatacaccatgaccagcatcagagaaagccacggacccatctgctcctctaaattctcgccgagcaggttcctcagctccgagttctgcacggtgaggaccatggcgcgcgggatagagaatagttcttcaccttccgggatgttgctttgtgccactagagcccgggcgagatattagagactgactatgagaattatgaaaccttcatttttggggagactccgtatgcacttttgtgtggtttaggagtatattctttcaagacttaccgacaccacgtccagctccagttgctcggagatctgcgagcctcagattgggattaagccgtacacctgggctggcttgcagccatgacatgaagttgtcagactgttgttgaaagccctcagcgtcagggaagtgggctgtagaagacatggcgggagagatcccctgggagggaaaggaggagtagggagagggtgtgaaacgaagaagcaaatgaagtggatacaataggggaaaggaaaataatggagaagaggggaaagaagaagaccgtcgggagtatgcaaagtagagagaagggtagctcgggtttagttcgggacaaccgacgggtgccgctttaaaggtcgataacgataacgaaaatcagacgccgccgcccgaggtctcatacatcgcgtatgaaggtattggctttcacttggtacagtctcgttgatatcttgaaataccgcccatcatgatcgcaattggtatggaaggctcggccaacaaactgggcatcggcatcatgctgcatcccaaggatggtagcgccccgcaggtcctcgccaatatcagacacacctatgtctccccaccaggcgagggcttcctgcccaaggatacagcccgccatcaccgatcatgggttgtgaagctggtcaagcaagctctcaaagaggctaaggtgtctgtcgacgatgtggactgcatttgcttcaccaagggacccggaatgggtgccccgctacagagtgtggtaatcgccgcgcggatgttgagtttgctgtggggtaaagagctggtcggggtgaaccactgtgttggacgtaagtacttatgcaagctatgtcataaaccgtgcctcctatttggagttggaactcgaacaaaccgctgactatgtgaatctccagacatcgaaatgggccgcctcatcactggcgcaacaaacccagtcgtcctatacgtctccggcggtaacacgcaggtcatcgcatacagctcgcaacgatatcgcatcttcggcgagaccctcgatatggcagtagggaactgtctagatcggttcgcgcgcacgctgcatatctccaacgacccagcaccaggatataacattgaacagctagcgaagcaaggaaagcagctagtcgatctgccatacgtcgtgaagggcatggactgttcattctccgggatcctggctgcgatcgatggtctcgctaagcagtgggggctaggcggggaggagaaggcgcgagaagatgaacagaagacggttgattctatcaccgcggacgagtcattagaaggcaagcctacacgcgcagatttgtgcttctctctccaggaaactgtcttctcaatgctcgttgagatcaccgagcgcgcaatggcgcatgttggatcgaagcaggttcttattgttggtggtgttggctccaatgagcgtttgcaggagatgatgggtatcatggcacgggatcgcggtggaagtgtttacgcaacggatgagcggttctgtatcgacaacgggattatgattgcacaggctggtatgctggcatacgggaccggattccggacacccttgagcgagagtacttgtacccagcggttccgtacggatgaagtgtttgtgaagtggcggtattgatatcgatgtcttgtttgaaccaaaaataaatctattatgtgttatgaattgagcgactaatctgatatcctttgaactcggtcggttaaatttgggaaaatcatatccatcactcatctcaagcggttttcaaaccatttgtattattgctgcataaatcgaagcgcctgtacagctgtaaaatcccaaatcccctcccagcacgaaagtaacgcctgaaaaaatgtgtaatatgtggtgatctcctcactagacagatcgttcaacggacattcatgtgtattggttgtggtcaatgactgggcgatctagtaataggatctagttgccattaaggaacccgagaacacctggacagacaggaaggactggcgagaaatgagccgaacaaggcagggaattgcttggaaatctttttatctctgcaaatcggacagaccacaacatgtccgaggcagtattcggtaaaataatgtatgcatgcaattaaaagaaccgcctatatgtttggacacagctcattctgtgacatcgccagtcggtttgtacaaaatagtcgtgacatactgcagacagattagttaatccacaaaggtgtatagagcagtgacttacttttcttttatacctggttgtcgcgcttgtagccaggacaccgttcttgatactgctcgtggcaaggtggttgaggacagtgtggttcggatagttcaaaacactgctatcgtctttcatgggagtcgtgccgttgagaattgacttacccaagaagagaggcagactgggaggggtagccgtatctccaatgacattggcggcctggaaataggccgggctatcttcttccttgtccaggtcggccaagaattgaggaatggcatcaccgaaatcaccgggtggcacctcttcctcggtttcttccttttctaaagggtggtcttcggtatgtcctacaacctgcttagaggcatctggcaccgtgtttggagtttgagctcccgctggaacggccgagtccttgtcatgagcatcatctgcactgacttcaatgtagttgaccagatgattagtaaagtcgacggcagtcggaagactatccgcagcgcgcattgttccatcgacaatgaatttcaagtggtgcgtgccaggtcgaaggttcagagtagtagacatgacggacggatttttttcactatcgagtgttagtcaagtcccggaaatcctagcctcatcatttgaccaaccttctgtgcagacggaacttcttctcccagttaacaaaagttccagtgacgtagaccttctgaccaggcgctgtccattcaataaggaccgggacggccttgcccgcaccactgatggtgtatggctggagctcatcaagcaactcctcctcttcaatggttgtatgacctgaagccagagtgctcggatccatccgttcgtctaagaggcgatccgctggcatcgactggatatgcgagtcctcggggccggcgacaggcgatccgggcgtggtgttggcatcgccaattggcaatggcaggcgtggtggatgttgtaggtgggccgatgcgctatagtacgaattgaggagcggggccgatggtgccacaggatcgcgccccgggacattgcgcgagatcgggacttggaccgggttggagtggtcgcgggatgggatgtccttgaccgcggagggctcagctcgacgtacgtcttgtggcgaagccttctctatgtttttgggcgaagattcagggacgtttcgggattgtagacgttcttgcacggatccttgaaatcctgccgagtgcccagcagctgtctcctttgtggccgaaggatcggccacggtggtcttcggggccgagatcgtgttgagagaggatcgacgggcgacttttcgatcgcttgtagagctgtggtgggcatgggcagacggcgcgtcgcccaccgggcctttggaagggttgttgcccatcgaaggcggggaaaggtgcgatagccttgggccgagattttgctgggaggtggggaaaggggagggtcaaactaagtcacaatggcgggctaagaaagaaacttccgacgccagctcaaagtaaggattggcggtgggcagtagtcaaagtcgattgatgtactcgcattgtcacggtacagtagacgccgatgacgccggaatcctaatccggcaggttagggcttagggctttgaagttggaccgcggcgcgtgttacttggatatcataacagtcgagacgcatagttagatgatttgccacatattttcataataatcatgagttgggtatcgatcctgaaatatcctctgttgctcgttgttggctttataatccaattactatcctacttgttgtcaactctcctcttcctcgcatcgccagtgatctacatcggacatgtcttcttatacctggcactgcttccattgcgtatcctcgtgatattagaggtatgcatatctaaatatcgtagtctttagtggtagcatgtactaaactctaatagggattcatctatttcatgactgtggctgtgcttgtcggagccactataggcatgatcctacattttaccggcagcgtcatatcacaattcctgcggattgaagagtcaaatgagccacggcgacctcgggtgaagcaagagcttctatattctgtgccccaaaatcattctttcgactatctagcagcgcagctggatgatcgcaagttcctgccctactcgacgatcttggaggaggaggagaacagctatgagtcaggctgatgtgcagatatctcaagtctagtgcataatatttctatgcctccggtctggcgctttccaaatggactctctattcttaaatacataagcctggatttcaggtaccgctcgctcaagccgaaagcatattcttgatggttgtttcaaactgctcaggttcgcggccaagtagtcgcgctagatttggagtaacaaccgcacattcaccatcgcggattccatcaaaagcagtcgcccagagaggcgcccagttgccaccaccatatgtgagaccattttggacctgtggctgcttgacgtactcgtccacggatacctgtcggatcttgattggcttatttagcacacgactgaatacatccgctgtttccttgagtgaccaagcacgagggccagagagaaggatggtcttgtttaaataagggaaagcagcgggatcttgagcgtgttgtgcaatgagttttgcggttgcttcccccaactcgtcttgtttagcccaagccaggccaggagccgagccatcgtgggggatacagatctcgttagaaggagctttgagatcgaaaaaggcagtatagagtgggaaggactctgaatacaacccttcgcgaacgacagtatacgtgaactgtgggtcttgagcgtgtagctcggccagatacttctcagtcgcaatgtgggcaagcatcacttgggccttagtattgagatttccatcaccggcaaacgcaagagacgagtaaaagatgtgcttaacgccactctttcgagccgcatcaatcgcggacttatgtacctatgaaaccagattagactttatgcgtcgaaaggttgtgggaaatgtaggaataccttaaatcgatgctcgttctggatactagcataggagatcaagtttaatgacgaaattccgtcaaacgcatggtcgagtgtctcggcgttgtcgtaatcggccttacggatgatagctccagcggctttttctttgctgagtttctctgggcggcgagcgactagcaccacttctttagcagggactagctcaagaaggtgcttaagggtactgcctccaagacctccagaggctggaaatatgccaagcttatttgccatcgctgaatcactgatgaggttaagaggaagtctactgaagtttactgtactgcttttatatccagcggatttgcagtgagactctgaaagtctccgactcggatgaattaatgtcgacttttcagctctgacatccagtggaagtccacggatggactcagtagttgattagtcaacatatacttccaggactacttaagtatcatggatatcgggaaccttggaactctttgtatgatatcatcaagttctcatctctgtcactgtgcagactaatcaaatctgggaattcttcaggcgtgattaggcgtgagatccgatttcggtagactcggacatgaagttggtcaaagcggggggtcttctcggagacattagaactaactagctcgaagaaggcgctggattacaaattcatagattacacgctttaggaagaatcccaaagagccactgcgaaggacagtggagtttgcgtatcgtcagggccaggatattggcatccagcagacacatggatgcaaatcaagcactaaaatctgtttcattctttcgagtccgaccaagaatatctctcgagcctagtgtataatactgtacaacatgataaggtacaatcgagcttactatccctggcgggtcggaccgctcatcaaactactaagagccccaggcaaggaggcgacctatcgaatcttcgcacaacatccttccacttgagatatattatatgcaccgactttgcggtctagtagaccaacgccccctatattgcctaattgggccacatatgcgatccaaccaatcacattatacacgtccagtttccaacaataaaaggtacggtgatgtagcatcctcaaatctatgtttaaataggtactctcttgataacaccaatctcagcctagaattgtccgatgaacgcagataatataaagagtagatagagagcagttcccacaatttcccgagctaagtacctacccgatccagtcatattgccgcattgctgaacttgaattgtttaaatactcttaaataccatcatgtttggacataaagatacaagaacagacttatgcggtcttgtcatgtcttgtcttgtcagtagtctttctagttctctttcagtatgtctttttctcatgtcagtgttataaccccaaaatattgtgaaaatggtttggatgtaacttaccgaggtacttgtatgctataaccaatcagtaaagccctacggaatacatgcaataacagctgcgaaaacccgcaacctcatgtgatgtatataattgaccatgtatgaagtacatatgcagagaatgtgacagcctaagcccatgcatactcctgctagaggtcgccctacttttaaaatagattgggtctcattgcattgccaaaagcacctgaggacttcttggcttgttttgtgagattcccataaactgatcttctccaccttctacaacatactccgcacgggaacatctatatttccctctgctctttttcaaatttcaatcatgccgtccgactcgaaaacatcttccaagtatatccacacaagactatggtgtattcaccgcgctgattcttgctaactcttaggcaggtcaatctttgcaaacccgccagtcaagatcattgtgggcagtgacgagcgcatttactatgtccaccgtggaacactcgagatccaccccgcatttgatgcccgactaaaggcttccactgacgaatacgaggaggcgattgattggagtggctttgacgagcagactgttgattgtgtattgaacttcctttacactggaggttatcaggcacctcaaatgacttctgtggcagccgaggaaggtgagacagatgcgggggaagaggccccagcgcaagacggggaagaacaagaagtagtggtggaggaaacagaggaagcggatgaagaagatggtaataaaccccctcttacatcttcccatctcggtatcaaaaatatcgagacactaataccatgcagaaccacaatcaccacctgacagcccacagtcacaaacttcatggccacagtcaccatgtccaatgtttcctgcacatccaaggattctgcaaccagtcgcggagtcccccatagccccagactcaccaccatccctggccctatcagagtgcgacctaaatgaccggcctctgactcctctagaatactgcgctggagtcactctgccctcggagcatgtttcggcgcaaaaggtcggagaccacgaaggagaagaccaagaccaggaagaagaaccagaacaagaagctgaagaaaatgttgctgagatttatctccacgctaaagtgtattccttcgcacggcaactcggcttcgtgaaattggaacaattcgctctgaatcgcctggccgaggtccttcttgccctagagcagacagacaagatcctattcccgtacttggtggatgcaatccgactggtctgtaagacgactagtactattgataatgcgaggaacttgctatctcagttcgtggcactgcggtacaccacgctggttggcgaggatctggacgaacttatcacagaggggggagagtttgtggtcgatctgtcgcataaacttgctcggaaactgacaaccatctcaattgcgtttaagaggattgaatatctcactcataggaatgaggagttgaaggaagaaagttcacagaaagataaagagctgaaggctttgagagaggaggttaggcatggaccgatacagggatttccgtctttcacatatcagatttgaagttgtgctaggcgttagtacacagtcaccgttcaatggactaatttttgggtattttttctttcctcggctcttctcatctctcacgtacatcaatgatttatcataggtatacgtgtaacgtgcttataggcaacccggacccaacccatgagccaatggcataaagcccaaccggatcctactgctcacattttctagcgccgagctagtgttcgccgatattgatttccgtgcgtttcctataccccacaaacccaatagttcctagcagatctttcttcagctgttcatgcaaagatattccggactagattctaatggcgtcgctatcacctcctgtctgctataatccctactatagtccctacttaatccctgcttagtgtgtacaggccgccatcgtggggttggcctccactgttgattttcaccgcatagcatgtccattccgttgggtgacttgtgggccatgtcctaggcgccgagcctgagatcgggcaacaacatgagacccgaacctgttctgcaagatcttgcgcattaatgatcagctgaagctggtgggtacatagtgggggcacgggtgatttcagctcagcaattgatttcattgaaattccctttctaccaccgaatacgatataagtaggaccttcttgcctggtcttagaatcttctatagtcagaaccttctacagtgaatctaattattatttcaaaatgtccacggtatgttatcaacgagtatagccacaaccaggtgaaaatacttcctattcaacggctcgacgctaacattctttgtgctataaagacacacgtttattttgaggatatagaggcatatacggatcacgcgcacacaatctatcagtaagtctatatacagcacagagtaaactcgtacaaccatgctaacaatgtattcaggatcatcgaagaggccggtttcgaaagagattcttatctaaggaccatgagctatcctcccgtcctatatttacccacgtaagtatctccttggcttcaaaggggttctgattatcagaacctgagctgacgtattaattagtgctcgcctcgatgatgatactgttggcaaattgaaggagtatggggtgcgtgttagacagggggatgaggattagatatagtcaggccgtcctttaccattggcctttggcgagcgacaagggctgcgctgcacatgggcagaagccagacgtggctgacggagagaggaaggcgatctagccagatctacagatctacagagcaattatagatggttccacaccggtttcagaagtaaattctctattattggttgaattgagacacgacagatcaggtgatatccgaatagtatcgtaagtcatgtgactacctaaagtagcttaaaacaaatagtgtttcccgtatgacctcgttgattatttggaacgacaggctgaccaattatatatagagctgatataagattgcctctctacatgaatccttcaaggcttatatacggccgaaaaagcggtctgtgcaaaagggataatcttccatttacattctggaaatggcatgtctccattgaatgacttgccatagctcgcgccttgaatacatgaccatcgacgtcattggaacgatcgtcgatcttatcgatcaagctgtggggtagaggacttacatccgagaccttccacgatgatcccgagatcctttctgcgcgtgcgagcgctgttggcagccttcatactcgctgtctttctcacctgggcaatattgacacagttcaaatcctacatccccaatatctcgtcttcacgggccattaccacagacctaacaccattacatcgccaattctggcaagaattccacgccctgctagagaaatatgcgccgggcacagagcctatcgtcgaatatcagagggcgcccacagaaggcttcaatgctcacaatgcaccgccgcgcccagataccctctacgttccggaggaagatatcacaaccatgaaagaagcgcatacggggttcgtcaatgcaatcgccgactccccacccgagctcccctacctccccaacacaaaaggcatagtctcaacagcagggggcccctacctcccagtgctagtgatatccctccgcatgctccgccgaaccggctccacgctcccgatggaggtatttctctccgacgaagacgagtacgaaccctacatatgcgatgtagttctaccctcgctgaacgcgcggtgcgtagttctatcccgcatcctcatcgcggccccagcccaaatccaaaaataccaattcaagcccctcgcaatgctcttctcctccttcgaagaaatcctcttcctagacgcagacgccttccccctcaagaaaccagaacatctctttaccaccgagcccttcctctcaaatggcatggtcacctggcccgacttctgggcctcctccgcctctccacacttctacgaaatcgcaaaccatccgcccccaccaatggacctgcgccagtcaacagaatcaggcgaagtcctcctctccaaacgatcccatctccgctccctcctcctcgcaacatactacaactactacgggccctcgcactactacccccttctctcacaaggcgccgccggcgaaggcgacaaggagaccttcctcgcagccgcgaccgccatgcacgaatccttccaccaagtcagcgagtccatctgcgccctcggccacgaaaccatccacggcggcatagccggctccgcaatggcgcagttcgatcccgtgcaggacttcgccctgacgagtcgcgggatatggcgtgtcagaggtgacgacgcccccgcgccagacgtcttctttatccacgccaactttcctaaattcaatcctgccactgtcttccagctccatgatgttaaccccgcgtttacagatgagggggagtatacgcgcgcctggacgctgccggtggatgttgtgcgggggttcaatggcagggttgatgtcgagaagggattttggcaggagattctttggacggcttgcgagcttgaggataagttccggagttgggccgcggatgagggggtttgtgatgcggtgagggagtattggggtgctgtttttgggaacggttgattttaccttgagatgtcggttcggcaggtatgagaactgacattgctattctcgatttttatgtgtctttcccggaacgcataaccaatgtctctctccggttgttgaccttgcacgaccatggaataatgcactcacatattcccccgccagaggtgtgccagaatagcctctcagaaatgacctctgtcataagaaggtcattcttgccaagagcagcaacagtatcgagaagaaaacactcttctaaaagcattcgaaaataatgctcattcacagacttctacttcttctatatgcatctcatgtatataactaagtagcgagcctcgttgttgtgaacaatctccttcttttgctcacatttcaagcgagggaacgacgacgtagcttcaacatcaagactccccaactcccaacctaagataaagataatcctggataatcctcgcaacctcctctgactccttaagaggggaacgacgaggtactcgtaatttagcttatacggaaaaagtagatcgaggtgtggaagagtgcgctttggagtcgtagcatggtgcggtgccacgggctgtggagagacctatataatggaggccttgtgcaaatgtatcacttactttgtagttttagctagatcgaaagtaatggggatgaatggagcagtcggcgggtctgatttggcgggcgatgagtgcaagatatagagacagaagaaaggaaaatacagagaaacagaggaagagcagcgaagacacttcatatcagtgccgtttacacgatacacaataaacgaacgaaaccgatatggtatgacagagccaatgcgttgactatgcaatagtattcatcgggcatcacaaaccacaaacccagccatctaaaacaggtaagaatacacaagacgggatatctaagaaacaacgcaaatgggaggcagaacgaaaagaggcctatgctcagtatgaatccatgcatcaaccacgagaacagctaatagctaaacacacctcaacgcttcacaatcccgaggccctcctctagacggtcaagcagcgaattcctcgacccaaccgatgaagcaggtgacggggaccggtcatgcttggctcccgatgtagtcatgacttccggcggaacatacgcatcgacgtccaattgcattcccaccgtcagatccgcatctggagggagatactcaggagatagaccgcttgttatgatattggcggcgttggcagcatgggcagtagcagaggcggattcaaagaccgccccagaaccagagccagaagcagaagcagaagcagaaggagaagcattttcggcttcagcttcaggaggagcagcaacatccctattccggaagatgtatctgtgctgtacaggctcacccacaggaggatcagcctccaacttagcccttctggcgaggcctttttgtcttcggcgactcggttttttgccaattgggtaatcgtgcacgtttggctcgatactggcgacgactcggctgctcgttccattgtcaacgttcggtgtgggaataccgtttggctcctggtatttagcttcgacggtggcggcagcggcggcggcggcggcatccttagctcttttgcgcgccttgcggctcattgggatttccccgtttttcccttctgttttctgttgggattgcgttggctgggtagttgtagtggcggttgcggatcccgtagctgcagtgttcggggctattataattgcggcattcgccttggctctagccttggccttcttatttctctttgacttggcagttgtaggagcagggacatctctcgaaccatcaaacgttatgggatcgcttttagagccggcattcagctgctttggagcgttcaactgcgttgggaggagactaatcccgccgtcctcatcgtcgacagaatcctcgtggaggccgatgtccaaatcaaggatagttccctcgcccttttccacgcgttcgttccaggcgtggaggaccttgctcacgtcgtcgtggtgggcgagataatcgagacggcgaaggaccttattgaagagctcggtctcatcgatattaggatcattgctgaactccgggatctcaaggatattgtacggctcactagaagccttagttctgctgtcatcgataagaatagtgttggtctggtcccagcggtggcccgcggtgagctttgcagcctcggcatcgcgaagcctttgcttgcggttcttgtgcggtgtattggtgcctggtgatgaggcaggggggttttttagatgctcgttgcctgggaatgcgccttggatatttgtctccgcccagactttgtgcagctccttgtagacctggagctttttgttgtattgaactgaggtcagaccgaacttgtcgcgtccccagcgggcgacgatagcatcatgcatgggccctgggaagatctgctcgcagactgcctctacagtctgcggttgggagctggaccagatcatgactttgtagtctttgattagcgtggctaggaattcatctaggcccgtgcgtctggcgaatttcggggggaatttgcgaagcttgcggtagatgagggtgccattgagatcgaggataacaaggagtggtcgcttttcggtcttctctggcttcaatgacgcttggtttgtgtattgcagtgtgggaagcgggattttgactggtggtgttggcgagcgttgtctttggggtgatgcgaaccgttgtcccgtgccaccggccatcgtactcatagatcgggtattttggaagggtagtggggtattcatatcggcagggaaaggaaaaggtgggaatggcatcccgctatcaaagcctggattcatccagggcatagcctgtgccatttgaaagaaagtttgatccatgctcatggggttttgcggcaaagtattaaaagcgccgaattgttggccttgtcccaatggtatttgtggttcgtattgtggcatggtaggagcatagccctgatattgataggccggtgacgtttgattagcctgtggatgctgatatccaaagttcgagttcatgctctgcgtaggagtatactgcgaaggtataggattgccttgcacaagatagtcatatcccgcattacgatgtacatcccgaggggcattgcggtcccaagagttgtgtgagggggcctgccgacttcccccccgtccattctttgctgatccagggttcatgttcacctcataatctgaatcggcatgctggggaactgaattcgactggtgttcggacgtaggacgtcttttgtttgagcgggacagcttgagggaggtgcgacgtgacgaaaggagagtagagaatctccgggatttcaaagcgctagaatttggcactgcaagaagctatttaaaagtaagtcagaataatcaacaatcgacatatgctatccacgtagcgaatagtggaggcgatacctgattggctgctctgagaagatgctgagagtgacgcgaagagaaagtaagtggggagtgaggggaggctcggccacgcagaagatgcaggaacatttataaaacaaacgcaaattgcccaggtggttaagaacgttcttcccatcagggcatcgcgaaaaatatctaatcagttcttatcgctctgaccgccccaagcggcaatatttttctttttgacggttcttcctccgcggggttttccaactacagcaacaccaaaatggctattaccgatctgctcaatcgccgagtgcgagctcgaccagaagacgaggatgtcttctctgaagcatcaggttccgacgaggattcgcaagctggctctgatgccgaatccaactccaacgaatcagtaagccaaccatacatctacttaaaaccaaattaacaaacaaagcagcacgcagacgactcctccgccgaaggcacagacacaggatctaattccgactccgactctgaaccagacatagaagaaaaaccagaatccgaagccgacaacgacgacgacttcaaagcctcactagcagacatctccttcggcgcgctcgccaaagcccaagccctaatgcgcgagaagaacaagcgcacaccaaaagacggcaccaccgccgcctcctcaaccgtcgacgaaatccgcacgaaactccgcgaagcacgcgaagaaaagctcgcggcagcctcgaagtccaaatctaaagaaaagaaaagccgctcctcgaagcacgcgccgatggagcaatcgtccaaatacgccgtgacgcgcaagcgcacagcagtagaactcccgcccgcgccgcggtcgcgcgacccgcgcttcgacgcagccgtcatgggccacagcggcgtggggaagcacccgcacggcggaacggcgtatgcattcctggacgagtaccgggcgtctgagctgaacgagttgaaggagcagatgcggaagacgaagaacctgcagcagaaggagaagctgaagggggagattcggcgggcgcaggataagctgcggtcggcgcagaataagaagcgcgaggcggatgtgcaggctgagcataagaagcgcgagaagcagttgattcgggagggtaagaaggctagtccgtactatcttaagaactcggagttgcagaagcaggttcttgagaggaagtatgcggagatgggatcgcgggagcgggcgaaggcgctggagaggaggcgtaagaagatgacttctaaggagcggaaggagatgccttgggagaggaggggggcggagggtggtgaggatggaggcatgcctaatggagggaagaggcggaggttggagtaactttttgtggtatacggcgttgatctatctgggaataaaagcacatatagcatatgagtattgaatatctgtttacatgtccacgggtatatgttctcgagtgatgcattaaaatgaccagtctcggagctgagggccctgatggcaatagcaaaggctgaaaagaagaaaagaaggcattccaaataggccaataagaggcagagaactcattaccataatgctttatctcccaaaaacaagtccaaaaggtataatacgaagcaatgaacccgcaacgcccaaagcaaacttgatgcagaaaagaatccaaacacaaaatttttacagggtgccaatctgccctgtcaatactgtcgtggcatagataacatgaaattgatgcaagcatcattgggtatgatggaaggtttccagactcgatcgtccaggatgagtcggaagatggacattcactgcccaggcattgcattggttggacttgccatggaccaatgtcgcctgggacttagtatcaaaggcctttgcattccaaggcagcaaactcctatgagaatataagatgatagcatcgggatgatctgagggttaggcatttgccagcaagtaggtccaagcaaattccatcattacttgaacttgggaagcagagccggcctaagcctctacaagaggcatgagaccaacagagcatgtcgtatcacgagtggaacaaatcccaagcccgtgcacagagacccaggaattcatccttctttctccgctgcgtctctggcgaatctcttcctgcaccgaaaggtccagggaacgaagcatgtggaccgggcatggcagctggattgggccggtattgagattcgggaccatgacccagtggcggacttccgttgtcctgttcatactcgctccgagggcgtcgacgtgccgtaacatcggacggggcaaacataccaaaagaggctggaggcggaccgtggggtgcttgcggttctggggcaagaggcgcggtcttggggcctgcgtggtggacttgtggggatggcggggttggaggttggtggcctccatagtgaacaatgcgaggcagcagctcctctcgtccgccggacatctcttgcacggcctcttcggccgagtgatattcgcggggtcggctgggggtgtgcgccacgctacccggcagaccaggggagggcatcggcgccaagttgttagattgggaggagttgctgctcgatgcattcaagtggatattcgcccggccagaatcccggtcccgacccaatgcatcggaaccaaagacgtcggagaggggaggaagacgattgtttgtttgggttgccggcagctggtgcatgtgggaggtcgagcccagggtcgggctctggttgacgacatggcgggtcaatggctgcggttggtatctgccagtgaaagtctggtgtagcggagccgattggatgactcgctcgtttgcgaactgggaagcggatggagggacgatggacaggccgttcggaggtctgcgctttccggtcttgggcatccccatcaagttcgactcagaaggcttcataccgtccggaccatcatccttggcggatcggtgcatgcgctgttcaatgatcgatcgctgctgatcccgcacggagaggctgcgctgcagctgctctcgcatgatcggatcgtgggtctggaagccaggcgacaggcacgccaggcctacatggtgcattgaggcggtcaaaggtccccccggagcacgaaccgacaaaccactggaggatggaagactagtcgagaggtctaatttccgaggccggggccgactctgtatccgtggggaggatcccggttccttctttaccgtaatgtgcgggcctccgttgccaccttggggtctgaattatgttaatatgtgaagctccggttccatgaatctctcaacttacggggaagttggacctctcttctcggtcggggaaccgtgtagcgcggatcccactttagggcttttggacatccggggcggagagaacttggacggggtattattcggaggagccaaagatgggaggtttcttgggcttgggttgcgagtcgggtgtggcgatgacaagggggccgccgcggaagcaactgcggtagacatggtcgagacgatgagatcggttttaaggtatcacacagaagattccagtatatagtagttcagtgtgttcagtgtgttccttcagtgtattcactgttcactgtatattgacttgatactcctttagaagatgcaagggcatctggagtgatgcgggcaaagtccgaaaagcggatcgaaacgtgggatcgcctcagtatatccaagtgtagagatatcccacgagaagagggaagaagggcggttaagcgtcaagcggcagaccagagtccagagtccagagttacaagcgagagaaatggacgataaagaaagtccgagagggggtcgacacctccaggcttaggaaaataaaaaggaagatgagatcgccgaagctctccaggggaaggttaaaagaaattaatccggcgataaagtacacagtacgttgatcctccgaatgacaaagaggggaaaaaggcatcagcggtcaccccagctaagtaccagatacccgagctgcccggtggacccaactgagacacgatgtgtttctgtttaggatccaccgattttattgtttgaggattgggatatatttgtagagtacggagaggactgtaattagtataagagtgtatgttgtaccttgtgttttgcacggaggtccctatatgtactaaatcccactattaacaatagtcctccccaactactccgtaccaacccttaacaactatatttatctcgcttttacacttcaataattcgctacacggtggatcccttctctaacagtagtataacaagcaaaccagactagcacctcctgataccaaatttatcgaatcacatccccccacccaacctcatcctgtggacgcttggcagagaaaaaaaacatgtcacatcacctccatccactcgcatggcgttatacgtcaaacaaggcgcagcgggcgcttatatcaaaggggccactagtgtgtggcgtccaaagtcatgcgagtacgaaaacactgaaactgaaactgagactgagaataattcagttattctcacgggttacctatttcgagcatcgctattccgtatagagtaataatagaccctggcctgcctctgaaattagaccgattggcctcctgtcacggcccttgtagatgcacagaccaggggtgcgtgccttgagttgcatatcatctgtgcagttcttagggtgtcgatgtgagatgaaatggctgaaaccgacattaccttgtttcatactataatatacatgtaactattgagattctacgtttcataggatattattcatttaactatcgggagatatccatgtaatatagttaaacctcgtatacttaacccgtcatactgcaggtatgttcaaagagggaatcattatacttccacaggagtatcttatcgtctacggaaaggatctactcccaacattattctgcgcatagtgggggactaaatggttgataaacactgcgtgatccaccacttcgtattattataagaacctaggtgaagacttttcaaaaatacaaacattatcacataaatctataacaatctaacattctaacaatcctattagaataatcacacccttaatcttcgacaaatgcaatttatagacaaaaacagtaggcggtgagacccgactatcgataacccacctttttttcttcgcgataatcttcgacttggagatccaaatcgcgcaaattcgttaggccaaagtccaagcttccaagccaaccgccagcaaagacatcaaccgaccgtcttgcaaatcccaaccacccaccccaaatcccaaacagccaccctcacaaaaccacaatgcctgaatccgtccactcccaagacctggaccagtccatggtcgacgcagagcagcccgtcgagctcctccagtccaacgaccccatcctcgaggagcgacagattgtcgtggtacgtatccgatctgcgcgggtacccaaatagacctcgcgatcataggcctaaagagagcatcaagctaataccatatttccttacagctcgccggcgccaccgaaaccgccgcttcattccagtttgaaggcgaaggtcacactatgggtaatgcgctgcggtatgcgattatgaagaagtgagtgtattgcgctgcgagactagattcggtgtatcgatgttttcggttcatggaattgaggttgaaggtttcggaagaacgtcgctgacttgttaatagtcctgccgttgagttctgcggttatactattccccacccctcggatccgaagatgaatgtccgtatccagactaatggtatgttctcctactgctactttcttgttctattgccggatactggatgtgggatgtggattttactgactggacacagatacgactactgctctcgaggctctggaaaagggcttcaatgatctgatggacttgtgcgatgttgtgacggagaagttcactgcttcgcgggatcaatttaatgcggagagtgggaaccgtatggaggcatgaggtggtttgtttgcatatgtattatttaattggcgttctgggtagggggaaaagtatattttctagctcgggcatgacaagtgcttttggttttttggtgtatagtttaagaaatacttgatgaacataacgaagttattcgtgatgcattctacgaacttattaccaagatgtgtgcagccagcagcaagtctcaagccaggcttgacaggaacgagataagataatggaatggcttattcagacaatatatacacatcatgtctatcgatggcgcagttccttgaactgccacatcgcggaccggaaacgagatgaaggggataggaaatgggagagaaaaaaacagaagggaagctttaattgcgaccctcgaggaaaccagagacaaagttggggggtagccgtgcgccaggatcttcctctgggcggaagtacttcatgacatgagaaagctgcttccagtagttaagggtttcctaggttgatatgatgtcagcatttgatcttgaattgcagggtgactacaacaatggataatcaaataaagacgagaagcattagttctcataattgtcttcttgaaagaatcgcatgttgcaaaggcatattatatacaccgggacagaggttggacctggactaacctggtactcggcgtggctctggtacaacagcacatccacgactggcaattgcttgacgtagcgatgtctctcgaactcctggcggatcttcgtgcggatggcggatacaggcatgccgagggagtacatggtctggatctcgggggactgtacggtgataccaggttagctgagtccgttgcgggtcaaattgtagcctttgaagccaggactgaaaacgagccactaatcaatccgctcctgcgatatctgccaggaacggagtaaagagcatatcaagggacaaggtggatcgtctaggatctcggggtaaactgaccgcgcggagccattcccggtacgacttcaggactcggaatttcgcatcgccccagttgacagctagaaaatgagcagctatattagcaccgtttcgcaggtgggatagactccgctgacgatcccgccgggtggacggcggaacgcatcgggcgtgggagggacgtacaggagcgcgagcgctgcgccagataggtagggttgatagtcatgttgaggagagtcgagtgcccactcaatccagcgtggttcaatcactggtgcagaaagacgggagggaattgaacgtgggttccggagctatgagggtggaggtttcgatctgaggttggtggtggaatgggctaggctcaccgcctgccttttcaaaaaaaatctttgcgaatttggggattatcggaccgtctgcgcgacgttctctgctcttgttttttttctgtcgaatatttttcgatatctctgattcggttgcagagtttattcgatttttcttgggttgttgaagtagtcgcaactctttctcgccgctctatcaatctttgcattcctcaatctctgtccgcctcgtctcaactcagtcaattcttcaagcactacgaaatggctcctaacgtcggaggtgccaagggaggcgcaaagggaggcgcaaaaggaggcgccaaaggaggtgcaaagggaggcaagtctgccagtctggcggctgcctcgcgcgtcagcaaatcgaaagatggtcccaagcgtccccccgccaaggaacagaagaccaagtcccggactgccaacgaaaacctgaagagaaagaagaagagagtatacaccgagaaggagctggatctgcccgagttgaaccaaatcacacccgttggagtgatcaagcccaagggcaagaagaagggcaagactttcgtcgatgatgcggtacgttttgcttcccatgctatgttctcttgattgcacctacggaagtcttatactaatactatcacctacaggagggcatgatgacaattctcgccatcgtgaacgccgagaaggaaggccagatcgagtccaagatgatgaaggctcgtcaattagaagaaatccacgaggcaaagagggccgaggccgaggcccgcatgaaggacaggaagaacaagttcgacgatgtcaaggattccattcgtcaaaagaagaagggcaggggtgacaagtccggggagccaacgagtatcaaggatagtatctcgaagcccgggcgatcaaagaagaagaccgttgcatttgcttaaaaaaagtctgaaaatttgtgtctatactttgattatgtatttagatgtcggggttcggcgttttcaccggtttatcaatctatgtctatcggaacagaaacatcattttgcataaacaccgtccatgctgtggttccccttgtaacccattatgacctgtcgcttttgaacctggtgattgtagcagttggttgggagggcagaatgtttgagaggcaattacagagaggcaattacagccccaaaggtagtgcgagtttgcgtcgcatcgagacgtattcaggcttaggtgctaggtcaggctttttgttggcgtcatcgtggtaggcaatgtttccagggagtttttcagggtgttcaacaacaccagggatactagtgtcaatttcccttgccattttgttgaagaagttcgccaccttaaggaacggttagtatgaagttaactttcaattctaatgtccattgcgagttacataccggcttgacaaaccacctggaccctccaagctcgaaccagccgagatggccaccccacgatgtagtcaacatgactccatatggcgtttgagtcatttcctggtagggcaaagcctctcggcaagcaatctataaagtcagcaatctttcaatggtgacaaaaaggacattgataacttacaggatcatcctcggcttgaatgctaaggaaaggaatcctgatagcaagcatggaatcggtggaagtggcatcacggtaatacgctccctcggtggggtagccccaggtcggacattgcagagctctgttgcatgttagaatcgcactcttttggccagaattaattcttcttaccggtcgaactcatggaggtaggtaatctttcttatcgcttcaacatcgatacgagggtttgtcgagacttgatcaacatgtctgtttcacttggttagttaccttttctcatcagccgaacagagagttactcacgcctcgaagagcttcttcatacttgaccccatggttctgctgtatacctccttgccaatccaggtgctttgcaaaatcatagaaccaatatccaagttccacgggctcgcacaaatcacggccgccttcagttgacagttttcaccttcctctcccagatactacacattttgtcagtgggtatagacagtcaggtttgcaggggtcatacattagtgaggatgttggcaccgagtgagaagccaattccaaaaagagggcgattagggaactgcgccctgatccacttcacagcctggcgaacatcccaagtagctcgagcattgtagagaacaccggtactgatgtttgtctccgcacatcctctcgaattgacaacacatgcttcccatgcgccatctttcacgagcggtgccaggacttcccgcaggtatacttcatgggagccaccactcagcccgtgcagaagcacaagcatgggcttggtgtcatctgagggcagcgcagcaaattcatccttagagaaaaaggatgtacgtgatggcagaccacacttttgcgtatactttctcgcttgatccgtaagctccgggtcttgaggcatgtcgtacggtgcgaccacgaaatccatggcatagtggcccgagaatgcggggctatctgactcaaaaattttacgtttgtagtaaatggggacatcgtcgtatttcatagttgtccaggctgtctgtaggtgcccattgaacaagaaagggtttaggttgcatgtttctggtgttgcagaccgacagacatccacgaaggtagttttttctttggcacctccagcaccgcagactttggtcaatgtcaacttattgtccgtggcgtgatggaaagctatgcggcccttgggacgaagccatgaaatcaagcccatggcgattagtccggataagaggactgatagggggattgaattcagaagggtcgagatgaggtcgtgcatgaggaatatctaaacactaaagaatgctcaaatcaaataaacggacaaattgatatccaatgactcttagaaaagaaaaaagcaggcttaaaagcacaatgctgatcgaaggatctagagcccaaagttgatatggatctgacctcggcaaaaaattatgttcggattttccgccccttgcccatggttcagtgtgactaagctgattttatgcctttgtatgtgatacatatagttatgcacgatatgtcaggtgatctgtgtcgcaaggatggcttagtcatgattctgagggctgcacgggacctgataacataacatgcgggcgtttttcgtcatgcacgtagtcagttgacaatgtcatagcgcagacacggctgagattaactttgatgcaggaaaccctccttatctggcgcagttgggaggagttgggggcattccgccgaatacgaagtgatgatgatatgatgctcaatgcggcaatcgccttgccgcatgcggaagccctaaatgcacttccggcgtcaagcacagggagaaatccccatgtcttccgacaatagcaatgtccttcttaaatcgaccatggtaaatgtagggtggaaatgttgaagtatccggtgctctgcatatggatcatcagacaaagaacggctaagccaccaataatcagttcctctgcctctttatatgtaatgctgatagcatttacacccatcttttgtgacctagtcccatggtccgtttccgggaatctttatcttccaacagactacttcaaggtcaaaggacctgaacctgctctcttttcttttgaaggtgatgcagcactggttgtcacacgatgcgcttgatgtctactacagcatgataagagtcgaaacgccactacccatcttgctgattcacaatctctcatgaggcttggtcactgaacatatttgagcgacctttaatctaagcatccatggctttaataagagactccccgtccgatatgtccgatcgtctgtaccgcgctacaaagaggttcaagaccatcatcaaaatgagaccctggtcaaagaagcaacaggagggtggccatggccgttgctacctcatggaattacccaccgagttgttgctggagatcgtatcccatctgacagtgttgccggaggctgcgcttgcactgaccaacaagcgcatgttcgcaatctccggagagatcctactctcaaaatgcctccgtttcaatcgcgactttgcgccgcttttccaccattaccgcaatggacataactttgacacgccccggtgggcattcctcaacttgttggaaaacccccgctggaaactatgctccaagtgtttgaaactccaccctcgagccgcattttcatccagagagttgagacggaagccagaaagtcgaacatgcaatatcggagagttagcaggggttgtcgatctatgcccatgcaagaaactaactttccgcgacaaactcgatctcgcggatcacgttcgagtgcgacaggtgacattgcaagccttgaaatcacaatttggggacgccgttgacggccgctactgctggcatacatgcaccgagcagtatggcgcaaccgagctgaagacatcgttgtttccagaaatcaatgccgacaaccagctagttcttcgcacagaataccaactcaccaccgagtcgggccaagtgggcaaggaagattacatgacaccacgcttcggatgtgcacatcgatcggtcgacctgtggctctcgagcgttcaccaaaccacgatatgtcgcctcttcgactcttcctgcccgtcctgcaagcgtatatcggtgtgcagcgcatgtgatacgagattgacatgtccacgaaaagcaccattccattcggagaagtctggcagagcgacctattcattctggacccaaagaagcctcggggggacgggtccagctcctgatccggcatggggagcacaaagaattcatccagccgaaccttcagtcagtgtcgaaaactgcaacgagttgtgtccctggacagtgcgcgagcatccagcgctctcattcgcgccgagtatagaacgggaaataatcgactctggaataggtaaccaacccatcaaccaactgtacacatacatcaacatggtttaacggatttgttcagctgcaacagaggcctagagaagccttgggagctgcaagataaggagttgatggaccaaggttcattttttctctcgttccgacttttgtctatatgttgtatagtgagcatcgtttcggcgttagattaatcttttgttagcatcatgtatttagacatattcatataattcaaccattcaaccattcagagaagaagtgactcccacgtccttatggtaatctttttggtggtctttttctatatctctttttctgggtagagggcggaaaaaacgacttagtctgtgaaaacaactttctatatataacctatgacaaggctggctagtaacaagaagaagagcgagaaacacacaaacgaaactaaaaagcaagcagctcttcaccacacgatcgaaatcgaaagtgtttgagtgcatcagccagtcgtaagccaatattccaatcagctagctcattcttgaagtggacacactgacatggcctttagtcggggctcattacacagaccagcatgaataatcgggttgattaagaactagtatcgtgataccataataaatgacacttgtattcaaaataggtgtcaaggctttggctagtgccaacacttaccttcttttggcttcttttgcaaggtcctttgttggagtcctttggatacatatcctttggcttatgcaaatgtctcctcggttgaaaacagcttaaagcccaagccaaagacaacctataaattttcagatataaagaagtcctatacttcccaaggtcaatgaagtcaaggtaaccgcaacaaaccttatcagctgaccgcccgtggtttatccggaccgacaccaggctccacgcccgcgctcaccatcccgcgcgttcgacttcatactcgatttatacgagtattgttcgtttctcggggcaatgagctacccaccacctggtcccggccaatacccgcattatctaccgccgccacagtatcagcatgggcaaattcccccgcagggactgtacaatagccttggtgctccgccgccatacgataatggctatggcaagccattgatgtatccttcgactatgacaccatacccatcgacatataccccacaaccgcagcagcagcagacgcgtcctccgcagacttcaccgcagcagccgctccaattaccaccacaacctctccaaccacggccacagccaggaccacagcttctctctcaactaccatctccccctccaccccagccgcgtcctcccccgcctcaacttcaactagaagagctgcaacatcagtttgtaaatccgtctcaactgtttgtacaacaacctctgcctactgctccgcgatcccgatacacccaactctctcagtatggtgaaccagctttcgtcccaagttctagtcctccaaaaatatcaccggctgctctgccagctccgccgccagtcaggcctattcacattgctcctgccccgtctcctattactcctaaaccaaacacccaaaccaaccaaggacaagccaataaccatataccgcaaccacgccctatcgtcaaagctgaacctacgccatccaagatctctcccaaagtaaaacatcagaaaaaaccttctacacctatttcgacgccgaaacgaccccagcctgctccttttccggcgacacaggctaccccgcaagtcatggcccgagctccgtctcctgttcaagcaaatattcaaaaccagactccgaagaagcaagttcaaccacaccatattgagaagaagagacagccgactcagccaaatgttgaaaaacattggaagccgacgcctaccaagtctacaaagcctccagtcgactatcaggttctgctgttatccctggctgatgaatatttaaatgctgctcatgctcgtggaacaacgacctcattgaccgctcgagagactgacgttgaggaatattacaagctggttgctaccggattgggctgtttggaggctgtcttgaaggttggtgaattgctctattctaggaacagcgcgcccaagctaaacaaatgatagaactggcgactgcaacctcgcaaagaagctcttgttagacttcgctacgcgcgtacattgtttgaggaaacagacaatgacattgaagcggaaacagcattgagtaaaggggtgtgtatttgtttccctctgttccagaatagcactaactcgagcagatcgatctttgtgaacgagtcagtcaaccgaaacttaatagcgaattcgttttgatttctgactcttatagaaccgtatgcttgacttgaaatacagcatgcagcacctgttagctcgaatgctccataaaagtaaccccaaagcttccttgaaagcggttgatgggatgatccaggatgtggaagcgtatgtgccattccacctttgaccacgggatgctaatatctgtaggtaccgccatgccgcatgggagtacgcattccgctttcttcgagtatcactttcgctgtcatctccgtcacaccaagactccgtgcaagcgttgcagaatcttcacaaaatcacggctatggctaatcgtaacggggacaaggctgtttcggcaatggcggctgtcattgaatcacttgcacacttgcagcaagcgacaaattcggattctatcgagcaggcgcagcgcgccgtggctgtcgcgcgaagccatcagctgaacgatgaacttcgccatatacctcaacttacaaccttaattcaaatggtcgatatctgttgtagtcttctagagtacgacgtcaaccagtctggacagaagttgaaggtcatgcaggctttgatggatgagacactaagcgacagcaactggcgtcccgatgggtcattttcggtccctctcaacggtaaatcggccgggccatcatccatcgacacaggtgacatcttgcaggttcagaatgggacattgctattaagcttcaactggctccctcagcacgatctttatgcgctttgttatttcttaagctcaatcacactcagtgccaagaactcatatgatggtcggaaagccgagaaatatctcgaggaagggcttcgaatggttcaaggcaatttcaaggccccccaagaaatttcagaatccatggtcaatgccaaccgtcgggttcagtggcgtcagtccctttactgcaaccttctcctccaacgagtcttcctggcttgcgctcgaaccgattgggagcttgccagccagactctcaacgaccttcgacaagtcttccaagagcttggttctaacctcctaggtaccattgaatgtctgatggaatatgccgccgggactatcgcacaggcaactggcgatctcaataccgcgctgaacatattccaatcaccaattctgtcactagaccccgctaccagcaagacaggacgcaatgacccctgtcgtgatacgcgcatcctcgccggtcttaacaccgctcttatcctccgtgatccaagtcactcatcgcacccctcgctcagcgcccttctagcaacgcttgaacccttctgccaaggcagtccaaacaagtatatacaagctgcctacttcctagtctgcgcaaccgttcactccgagtctaccatccaaaccaaacagtacctccagcaagctctgcagtccgctactgcaatcagcaacagccaaatcacctgcatgaccctaacattcatgagctggaagtatttccgcggcgtggtcggcgagcaagctgagaaaagcgctcgagccggccgtgcaatggccaaacgagctaatgaccggatgtgggcgagcgtcaccgacgacatgctggctgagaccctggagcgacagggcaagggtgaggaagcgcagagcgtccgcgaagaaggccaacgcttggtatcgggtcttccgccccgtctgagacgtccggcctgattggcttgtctattgctataaacatgatatacgtttttgtttttttctatgtttttctttgcgtttgtttcagaatttttcttaggaggcgctcgtttacgataccatttgatggctaccagggaaggcgtttgatattctgcggttattgacacggtgatattattggcgaatccagaaatacctttctaatacttaagcacggaagtttacccattgatgagtaggaaacgttgacttgaaaccattgataggactcagctcggtgtatatcacaccctaggaagatcactttcgctccctataaaaaagaacatgaacacccgacatcatgcgtaagtacaaacaatatggtataaaccaacccgctgtcacaaaacacaagcttcaccagtcgaagctagacgaaacaaaaaaaaagaaacaaggacaacagcaccgccgaagtcaactccatgcccacaatacgccagcaatgtccaccagacctcttccctcatcaacaaggaaagaaaggccaccctcacacgacgaaattaatattaaactcgaaacctcccccttcctccacataatcgaaacagtcaacggacctcaacccagcccagcccacacgccgcgaattctccgcgcaagctggatatccttctgcataatagtcacgcgcttcgcgtgtagcgcgcacagattcgtatcctcgaatagatggaccaggaacgcctccgcggcctcctggagagcttggatggcatgcgactgccagcgcaactcggcgccgacctcggcggggagcaggtcgagtgcgacttcgcgcactaagcgcgcaaagggcagtttggcgatgagcagatcgtaggagcgttggtagcggcggatttctttcaatgcgacggtgccgggcttgtagcggcggcggcggcctgtgggggttgggtctccggctgggaattgttagaatggggagattgggattgggttgcgcatgtggaggcgtgtaaggcgcttgttttggtgggagagttgaacgtacgttggacgttggcggggctcttgctgacttttgacttccctccttttgtcttgcgtgctttggttggtgttgcatcgtcgccggtggtgggctcggcggcgggcacggcggctgtcttgcgcgctttgtttttctgtgcgctgcccggtactgttttgcgggcttgcttgggcggcattgtgttatatgagaaatgcgctgtaggtatttttcgtagtggggtgttgaaagcgatcaattagaggttgatcgcctggcaaacagcgttctgccgcgtttatgtcgagattgccccttgcaggaactttgtccgagtatcgagaagacaaaggtttgcacttgcgcacgaggattttcgaagggattggatttaatcgtatctgccgacaattgaacagtctttgttcggaaatgctgggaaagctatagcaaccattcgggccttagcgccccagcccccgtgattctcacgtaaacacgcgtctcgtgtctggcacgtgacgataaactggcctacctggtcttatctccgtcatacgttgaataccccggaggcacttggagagctgtcagtgctcgtggtgatcacactcccgctcctttcgattcccgtccgcataagaagtcacaacaccacacgtcatggccgccctctgggagaacaatgggcaacccggccagtttcccctcgagcaatggttctatgagatgccacccgtcacccggtggtggacggtagccaccgtcgcaacctcagtcctggtgcagtgcaacatcgtgaccccattccagctattctacagcttccgctctgtctacgttaaatcgcagtactggcgactcgtcacgacattcctctatttcggacccctcaacctcgacttactattccacgtcttcttcttgcaacgctactcccgccttctggaagaaacctccggccgctccccggcgcactttgcatggctgatcttctacgccatgacgtcgctcctcatcatctcgcctttcctctcaatacccttcctcggcagcgcgctttcatccagcctggtttatatctgggcccggcgcaacccagatacccgtctcagtttgttaggcctgctggtattcaccgctccctacctgccctgggtgctgatgggattcagtgtgattgtgcataagatcgtgccgaaggatgagatcctcggcgttgtcgtcggtcatatctggtacttctttaacgatgtctacccgcctctgcatggtggccaccgcccgtttgacccgcctcgctggtggcggcgtctgtttgaacccgtgcctcccaacgagcgtgcgacgggtgcggctaacgtgaaccgcgagtttgtggctgcggcggcgccccaggttcgatgaagcgtattctttttattgatctagtgtcgctttctggaaggaatttgaggtttcttgtggcgttgaatgggaattgagctcgatctcttccacgaaagacatgtctcgctggtataagcagagccaagggtgcaatgggtccgattctagccttgatgtcgttcacgggtttaggcttttgatatcaagaccgtgggccgtaccagaggggaagctgcatacagcgagtttcttggttacatcagatgacagtatattatattgttcgagttttgcatgagacacttgctgaacgtggatattggcagcccctttaggctgtgtccaacagtggcacgatggagcagctgctctttatctgatgataccccttatctgatcatgtgagacgttgcccttggcccatgctcaatgtgatctatcaaaaaagcaaggagtaggacccgattccttttgtgtttgcaggtgcatttttttagataggaatagccacagatacccagattttttctttgcttaccgcttagagctgcatgcagaccttaagatgacgacatatcaaacagtgctagtacaagagacattcgacttcgctttgaccctcgatagacccttaaagttaaatgaagtaaaccacaccacgtgattgcatgcattgccgactactatcaaagctccttatagaaaacagccaagcatgatggcactatgccaagtctatacagcttcgatcctgcatgtgcatagtatcgacaggcctatttaaaacaatataggcagcgtagttaatataatgcagcctagtcttctatctggttactgtattattattagaaagagtgaagaacactacgtcagatccaattcaggcatcatcatagatcgtacagccccgcgcatttcaagtatagtcaagtcacaccgcaaaagtgccaacttgatattctgccggcaattatgctctccaccagtggaaagttgaaaagtacgagcggtataccgatctcggaaggcggtccatccagggccccataagtccagtacaaaccggtgctatggggccggctaagcaagagccacgtactccatgcctatcatagtaagtgtgtctaagtacgtgtacgccgtacatgctacacatattaccctggtcaatgcatgtctactccgtaccagatacctaaataatcatatgtagactacgaacacaattaatatcaatttatcccaaagagtaattcgccgttttttcgcgcccacatcccgcttatgataagcacggccggcgatctgcgaaatgcttgtacatagtactttacttttcaagtcccaggctccagcccaccgagtctcacatcggctaatcttagaacccaaaaaacggagaatcggccgatcttatcggagggcacatcggaggacacatactgagataggcacccgagttaaaagttagcgatacggatacaacgtggtgaaccgtaggttatccggtggattcgccctccggtcgtgttggcgtaccagagcttagcggggtccgggtggggggtctgtcaaggtcccatggaaacgcgtgataattcgttgttatttgtgcaactgataaatttagccgcggtttgattggcccggtgttctgatgtttcaccaggcatctgcatactgtatccattgcataccctatctatcgagtgctacattggaatatataacatacagagggaataccactccaaatgaggcccataatggaggggcaaggacacacttctaatcgcattgtgcacggccccggcgtgtggcaggtggcggttcacttggcaaatcggtgccaattcctacctcgagtgtggccacgcggtggccaagtcgtggccaaggcgtccgaggctggttctttgtttcatggattggattgattgaatcggccgcgtgagagatagcgtcataaataaatcgggatccaagggcctatgtgtgtacggagtattccccgccacatgggtgcatatgtggcggggagcgaaatacatacaattggagattatgatacatttgtattgctatgtacatacattattataccaagatcaatctggaatagtgccgttgtagtcaaactctgctccatcactgctaactgcataatgcctaggcagagaagtcgggactagagcacatgccaactaccactagcctcccgaggtcgagaaaggtacggtcgaggacatgcctaaataggactagtgcagtacacggtgctcacgttggcgtggggattttccccacggtaatttatttacggtacggtgacgagtcctcaaagttaattattttagcgacattcatggcgccaagggaagcaattgcagttatatataaacgacgtagttgtgtatactgtatatccaatatatcctacacatataattgagccaattcacatccgacggaaataatcaatccaactcaggaatacacagtactgtaagttgaaatatccataaataaattaaaaggttaatcaattccccttaattgccccatggccaacgcgccaatcacatcccctcccagccgctcaatcttggaaccacagccacccctctcgtgctcagcctcgtaatgttctcaacaccttttgtcccttccccgtattactttcccttcacctcccaatcctttttttcctttttcgcctccaatttcgatttttaaacgctgagggtctctcctttccctctttagcttttagtctccccactccccgtcactccttattatcgaactagcctcccctttctttaaatactcttttctccctcctttgtctattaccatcttatgacttgcatttcccgtactttgacctaactacggcctgaggggtatgtgaaacaaccttaatacgaccctaacgactacccttttggggcttcaattggctatcgcgcttctcctattcgatccttaaaccttcaccatgcggcgcggtctcgttatcttccttctcgtcaacctcatcatcctctccttgctcgtccggagtgtctcgaccctactggcactactagtcgaggatgccgcggccgacgccatccaccgcgcggagctgccctcgccaaattccagcctgatcgagcatcgcccccagatcattccaaagatcattcaccaaacatacaagaatgagaccatcccagaggtctgggtaggagctcagcagagttgcattgacttgcacccggactatgaatatattgtacgtgcatgccctttgatccgtcggatccaagctgaccctctgtcattagctctggacaaacgaaaagtcgcgagagttcattgccgccgaatacccctggttcttggacacattcgatggctacagttaccctattcaacgcgccgatactatccgatacttcattctcgcgcactacggtggaacatacattgacctggacgacgtaagtatacctacccggaagaccatggtattccattctaacatcaaacagggctgcaaccgtcgcttggatcctctcctggcttatcccgcctgggtacgccgtacggccccaaccggtatctccaatgatgccatgggctcagtaccccagcacccattcttcctccgtaccatcgaagagctgcaaaagtacgatcgtcactggctcctcccctacatcacggtcatgtactcaaccggaccgttgttcttgtcggtcatctggaaagagtacatgcgcgatgggccgagcgaagctgggcgcgtgcgcatcctcatgcaggatgagtacaacaaattctcttggagcttcttcacccaccaccggggtaacagctggcacggcaaggatgcgcatctgatcttctgggtaagtgacagtctgatattattatcgaacaatgctaatctctcacagatgggtgaacactgggtcttcctcactatctgcggcttcctccttgctggaatcgtcgggttctgcctctggtggagctacggacgtgtcatgctcctaggagccaagtaccgctaccgctactccaaagtatcaggcatcccaccgcgactctcgacgtcgccaacacgccgctcgcgactttcagtcccgaccctcctgcgacgggtcagcttcaaagaagacgaagagtccggcggggtcacagagacctcgtacgaactcgaacgtcgcgatgactagagatctagagattacttctcaactcgcaacttgccattttacagcctgtgtatttgtctgtaacgacacggccggatatgatctctgcatcagcatttattgtacaacttttgctctttctttctgtgtttaggagcgcgttatgcatggtgtctcaatcctgtgacgggatcctggattgaatgctcacctggagcacttgggtttgcttttggacatgtgcgagaccttgtctatcactcggttccatttcactgtcccccttttttttttctgtctattgatttgtaaacaacttggattcgcttctcgggagacagtggaatatatggacatgcctctatgccggattcggatatctccggaaaaatgatgactcgaaatactttggactattccaagtataaaatttaagtatagcactagaacagtccgtgcaatcatgtcttgaaacctcaacccgcaatcctgaaaccctaagttctccaatgacaacaccgtgccttgaatcgccacctctaagcttttcaggtgaacctatcacgtctgggcttggacatttttttaaaaatagtgtactatgtaacacgtccattgtttgagcatcccatttttggtgttttccttgatctaactaacatacttcagtccacatctcgcattctccgcgtctaccctacaatgtactccctccgcctcccctttgtatgtcccagctgcctcggacaatgcaagcccttctttcatgcctgacatgttcgaggacttataaagataatctgctgtgctgctctctacacagcaccaacatcatttctatatcatcctataacagccatccatctgactcttgactttgacattcaatccctacacgatatcgccgttcttctttactactataacctcaaaaatgcacctccaaaccctcctcctcactctaaccctaaccctcaccatccaaacaaccgcaacacccctcccaaccaccctcttcacccgcaaccgcaacaacgcagccctaaccgaatcccaactcgtcaccatcgccccctcctcgaaatcctgcaccgacgccccagcagcaggcgaatgcgccacggcaaaacaagccgcaaagttcacctcccagtccttcgacacgtacaaagtaacctcgaaagccgagcaagccgccgtaatcagcctgatggcgttcgaaagcggcgatttcaaatataataagaatcatttcccgggtgttgctgggcagggtagtgagttttatctgtctaaccttacatctaacataaatactaaccatatccttcagcacggaacatgcaatccccatccttcaacaagaaatacgccgcgtccctgcctgcactcaaagataaactcgctaccgttaacggtcccgctgagctccttgatctcttgcgcaacgacggtgcgacggacttcggctctggtgcttggttcttgaccacgcagtgctcgaaggaggtgcgggctgcgctggctgatggttctgagactgggtggcagcggtttatctctgattgtgtggggacttcggttacggatgagaggaaggagtattgggagagggctgttaaggctattggtgtttagattgtggttggtttgatttgtggctcggagctggttcttcgctgttgactgtgttgagtcttgactgtgcttatgatgattatggattatgggaataggaatggcatagaatataaatgaagttcttttcatggcacctctataatggtactaagtaacagtaacagtagaccaccttgtacggagtacatctatctcattcatctcattcattacacaattttaatatccaaactacaaaacacccttggtactaacaacatcacccgcaccaacatcacccgcaaccctacgcttacaggccgtgcgaatagcaacagcaagcgccttgaacgcactctccgcgcggtggtggtcattatcaccataagtgcaaccaacatgcagcgtcacgcccgctgcctgcgcaaagctctgcagaccatgcgtgatcatctccgtgctcaagtcgccgatcttctcgcgccggaagccaaggttgataaccgcccacggccgactggagaggtcaatgaccgcccacgagagcgcctcgtcgagaggcgcgtcgccgcggccgaatcgctcgagggattgtcgtgcgccgagtgctgctgtgaaggcttcgcctagtgcgaggaaggtgtcttctgttgtgtggtggtcgtcgactggggatttgttagcattgccattgtcattatcattccatattgtagtatagtatcctgtgtatgaactcactgtataaatcacccttcgcccgaactgcaagactcatcccgccgtgcttcgccagcgcgtgcagcatgtggtccaggaacccgatgcccgtgctgatggtgatctgctgcgtcggggtgaattgcgtcgcatggccggcgtccttgggtggcacgatgcctttcttggaggcctcggcttctttggggtctgttggggcggggaagtgggctgatggttcgtagggtgggaggacgccgccgtctagcgagagcgagatttggattttggtctcgttggtggaccgggagatggtcgctgtgcgcgccgggagcgacattgtgggtttagggatttggtgtagggcgaattggcaaattggagagagtcggtgtttggtagatgcccaggtgggagataatcggatttcttttttgtctgactcgttcgcgggagaatcgttgatccgcgcttcagtatggagggaatggacgacctgaggttggcaggtttatgacactggctggtccaggtttttattctgactttctggagatcgatgattctttatattgtcttcgggatttgaaacacatatcttcttcggcattgtctactttgctttactttgtttatcgtcgcactcggcctcgataagaccgactcccatctaaattcattccctctgggccgtacacttacaacggacataccagaatgccaccaccatctaaccacaggggcgatgtcgaacccccagaagaaatcacctgggtagccgcccaaggcttcctgaccggcgcgctccgcgtaagcaaccggacctccaattcgtctctccgtgaactcccagagcaatcactaataccctcaagtttggctccgtgtccatcttggctcatatgattcttatcctgccccaccccttcgtcttctccgcgccaagtccacccgtcgcatatgccccgacacaaccccgtccacgccctaacatattctcccgcgactacctccgctcacgactcttccaccgccccatagagggcttctcaagctggatatccccggggtcccgtgtctaccgtggtctgacgccgcagttcaaggtctttttgcaggtcgtggctatgacgctgggtggttgtatctggcaggagaaacgcgtgaccgagtatatcgagctgctgagacggattaaacgcacggagcgactggaggctgaacgtgcggaagggcatcgtcggtaatcttatatgttgtaaagatttggagacatccactaggttttgcaacgatgtagacttggtttggatggaacttggaacgtgaactttccaccggacacaatacatccgccgcttgggcggaactcggatgagctgaatctcatttctcggtcgttttccaaacctgcacggtctcacaggattgaggcgaatactttgtagccctcgtcagagttactcaccgtaggccgacggaggattgaacatgatcacgtggcgcggtcttggacaaccagacaaatgagcgtagggaacttgtgcattctatagaaaatctagattgctcttgaaagcctgtaaaagccacatgcgcaatgttgaaagtaagtcgaccttgctatcaccagtcagagcgtattgcatgacctcttcagagtcaggctatgtatcttgatttatcgcttctagctcgtcatcttcgctcggtctgtttctactgcgcattgctcttctaccgtagaacacccagcttagttggggttccgaacagattaggatgactctagccttcccagactcgtagcaggtgtagacccttgttagggcacaagccggacaaatagggaatcacccagccccagaaggctctgggcccgaaatccgggaataatcgaagccacccggttctacgcggatgaacatggtgaggatgaccagtacaaactacatcatgagcatcccgggtcgttcgggctgtcatatgtcgaataccaagctcaattattacggggtattgaatgattccacctagcaaggcagccaatgtactaatgtgaactatcaaccgtctaatagttatacgctgtatgactgggctgttgtagggccgaactatactagctttagaaagatgatgtccgtaggcttggcctccgatgctctagtacatctctagtacgaagagcacgtaagaggcgctgcactaggcttgatagtgccgatatagtcggaactacagggattgattgcattagactaattggactcctcgacatattgattggtctttgtactccagaacaaccctgaaagctacgtttgtacggagtatgaactataccccgtcctccggtcatcgttcatcgttcatccccctatacgatctacactcaattgacaacatagcatcataggttcaatctccggatccacccctaaaggaatgatcggcgactatggcactccacgatactgcttccgaaggggtattaatctctcgggcccacgtgaaagggagatcacaatggcaatcaggggggatatccccagacaccttggcgtcatcggtgacgaagttcattcagatcagcggttgtaaggttcactatcaggtcggatgccatgttgtttgggttgatgcctggattatgcctgatccagaccgctttcgacactgtatgtagatatcattggaattgaagctattcccactctaaaagtctctatattcacccattccctgccattgaatctatctgtctatttcaaaggtcctagggttaggtactttgcttgtatggtctctatcaagtaatccaggttctattttctgccggctcaacaggctggtccaggcatcgacacctcaaacctcaggcatccaagtttccccccttcgcacggccttctgacggtccttttcggcgccacctcagatttcaagatataaataagcgatctctgaaagtaaaagaagaagataaattaaaaaataaattaaaaaccctagagaagaaaaaaaagccacaactgaaacatctccagttgatacagttggacctgactgcatccgtccatcctcgattccctctatttcctcctttttccatcttttccgactatccctctagtggattctgctgttttcatttgacgcattcaatttggcctccttcttatgtgaagatatcaaatcacattagatcctgtgcatattgtggattccccccttccgcaaccatcaccgcattcaacattgttgacaggttcctgttgtctgcgcttagatatagggaacagtttcccatcttagcaattgtatgctaattgcttctcatggcgctgtgacgatctatagtatgtgctaccttccccctcatttgctccgctccctccctcctcgcgttattcccccgtcatgacccttcacacggctaattgatccctagtacgaacgacgttgaggtcgtcgagataagcttcctttctcagtacctagcactcgcgctactcttccaccttacgcaactccccctgcttctgtaccactagtccgccctaccgcaccagacatggctgaaatgatcggcaaacgacaacgaagaaagagcctgagcgtgttcagtccatccctcacactatcaacccccctccgacctgcgatccacacccgaacaccctcggatgataccttgacccgggataagaaaggccggcggaattctagcttcttcggccggtctcatagtccgaacagagcgtccgatggatcgaataaccgccgccctgggacggcaggctccgacacccccgtcggcataccatccacaccggtcatggaaacccctcgtccgcggaggaagtcgatgcagaagaagcgcacctcggtttttggttctctgaggtcattgcactcatgggaagacgatgaaacgatgagtccgtccgtcggctcgatgatggacgagcaaagcatggccactccccgaaatgggatctggtcatctgcaatcctccaccacggggaagttcagacgactggaggcatgtggaggaagaagagtcattacttggtcctgacggatacccacctcattcgctttaagaatcaaggcaaagccgccgatgtctttgcttgtattcccgcttcttatacccgacctgcgccttcccatcgccaatcggtggcttcagtcagttctctgcaggatatgcaattcatggcctctggcgattcaactgccggaatcccactaaacagcataatcgcagtctacatgttggaagatgcacgattgtcaccatcggtcgaagtggcctatctcgacgagcgcacaaacaaagccacattggtgcaaatgcagacatctgatttgcaagaattaaacctttggatggtgggcatccgtcaagccgcgcagatggctagagcaaattgtccaatgccatttagcaagggatcgattgagtatgtaacccgtatgcttgagcacgagcgagattacgacccagaggtgttccgcatgttccgtgtcattcaaatcgcgtccagcaagtcaatcacccgctcttcctcggatgacctgacgaagctgtcgcccacgggctgctatctcgccattggcgcacataagctgcatctgctgcccatgcagaagaccaccaatcgatcatcggtcgtatctctgtcagactgggaggccggtacttcatttggtctgatgaacctgactggtttgtcgatggagtacggtgacgacagcctgcatctgatctttaggattcctctcaagaaatcattcaatgtctttttggcctctgttcattccgttgaaatcgcatgttggatccgacaacacactgaataccttcgcccattgtgggtacgacagccatacgaattcgtggttccgaaagaactgcaaaatgacgacaatttcccgcctgttgctttagatgaagattatggatgcttcgaccgaaccttggtcgcctactctgccagttatgacatcgacacatcaaatatacgatatacaatcgaccaggaatgcgaggatgctccatgcttccgtctgctgaagcctgcttccccgaaaaccccgcggtacaacgctttagagctcattgctgtcatgcgcgcacttcgctataatgaattcttccggtcaatctcgttccgcggggtcaatctggatgcattgcagggccttcgtgatattcatggggtggactccgacgtccatctcgaccgaggaggcgcctccgtgcatattccaggccagacaaatctaactgtcctctcgcaagaggtgcgagctttagctctgaagagcaaatggcttcgccgactcgacttctcttactgccttacaaggatcccgacaccaactctggacaagggtactcgtgatccaggctgtgggattccagaagcgatcttccccgtctgtcgccgagaactgactagcgtggactgggttgtgcttaacggtatcaagctaggtgagtccgatttggactatcttgtcgatgcggcttcgcaaaggcgtagtcacctgcgcgctctagaagttggagactgtgggttatccgtgcatgacctagatcttcttctgtcgactatcgtcgcacaagaatcgacacttgaggcgatcaacatatcaggcgtgcagggccgattgaatcccgatgtcctccagcaatacattggctattttggacaaatccgcaaaatcaacttatctcgcatatcacggacctctggcactgaccctctcatcacggccgaaatgctgttcaactggcgactcgaagagctggctctcagtcggacggttttgaatcgcgagaccgtggatgccattgctacttacctggctagcgatcgctctcgaaaccttcgtgtgcttcgtcttgatcagtgtggtctgaccggagaggatgtggctatgttcatgcagtcgatgtctagtgaacctgattccccgcgcagtctccatctgcatgtcaatgagaaccgcattgacaacggctgttctcacgttttcaatgctattgcgaacaatcagaccccttcgcatctgtcaatgcgtatgattgatttcaagaaagaagaccatttccgtgagctggtggattcacttcgaaagaacagcactctcaaatttttggatatttcaaaggcttccctcccatacgatgctagtcctgagacttgccgatcgttgcaagtgatgctggaggagaatgagacgcttgaggctttggacattagcggtgacaacgcgcaccttgatgttgcacgcttcggcattggtcttaatcttgcactgactggcctgaagaagaacacatctctaaaggtcctgagaattgaacaccagaaactcggtcttcaaggtgcaaataccctagcctccgtcttagaggagaatgatacactacgtgaagtacattgtgagaacaatgatatcaatctgcagtcctttacggtcttggttaacggccttcggtgcaaccgctcccttctcaccctctcctgcatggatcgggaccgagtcctgtccctggacaaagtacgtcgagaggttgataatgtccgatgggaggctagcaacggcaaccaaagttccggccactcggtccgtcgttctctatatgcagcgatgaccgttggccaaggggggcaagggcacagactgagcaaagcgccgccacctagtgtcgcctcggcattggaaaactctccattcgccaaccataacgttgaactagtcttgcagtctctgaacgagagatgggacaccgaagtctctcggctcaatcgatatctcctccgtaactacaacattgcccatgggattgaggaaattgatgatgattccgccagcattggacgacccgcaacagcggcgagcctgagcacgatgtttgacaatttcaaattcgacgtgtccgtgtcggcagatgagattcgaacgccgtcgctgctagacgagcctcctgctgtcatccgactttcagaggcatccgacaccccatcccagtcctcgtcgtacatcgagtccacctccttccaaacaagacgcatttcatccaatacacgtcgccctcataccgccgctgctgcacacttcactccatccagtcatagttcttcggcctctctcctagctctcccggttccagccgtgcccccagcagttaagaaagcagagagcgtgcgcagtggacgcagttcttccagtactgcctcgttcagcgccggcagtacacgaagcgcatatggcgtcgcctcgtctaccctaagaggcttcctcagcggcaccgcgttgagggaacgtcgccgtgcggatgcagtgcgcccctcacctgtttgtgtcagcgacgacaagccgcctcagctagactggacacctccgaagcttgacttgggaggtctctagagccttccttacaccctcaccctcaccaacacaactacctgtacagaatcctccacacctcacccaacacgaaccgaaacgaagcctggctcggtatatatacgacgaaccacacccaggtttcgctgatatacccttccctgtgaaacatttttatcttattaactcataactcataaatcaacccaaccccatccgaattcccatttctccaaaccggccagttggcactgataccctggcgttgcatttttttttacaagaccgcattctccgggcgttccatattcatttcctcatttccattctcattctgtgccaacatcttcctattcatcttatcgtgtccttgacattttgttctttgttttattgctcttattggaaagcgtcctcattttgtgggttagtgacgctcatgcgtgaatccatggctaatgtttattgggtctggggcttgggctgtttgatattttattgtgttgttttctatgcggttgttcctctctagagcgaggattgaatactgtttggataggcatgaaacactattgttcctttctgtttgatttcctagtctcgaagactgagtagtttaagtgaattggaggctataaaacacaaccatttctatatatgcataaaattgataaacatcccacgaaaacgcgttcaatctatataaaaagcaacgccacggatgtatatctaagcccaatcgaaatacaatacaaatgggagaagattaaatctgatactatacaaaacggattcccatctcaccacctccaagtatcctctcccagatacctagtcgaacctcacatatcacaagaatctttataaacaagaagcccacgctcacgatccttctgatccatcttcttccgccaaacacgtcctttctcagtgatctttttcaaaatcgcgaagaaaccagcatcatgatcctgcacgttcttcttcaacgccacattgcgacgatgcttgatcgcagccagaatatggttgctctcttccacactgagctcgttgagctcgtagtcaatcgtccacctgtcggacgccgtgaaccacgtcggccgctgcaccggaacgccattcaccttgttgttcacgatgagcgtcatgcctagaatgtcctcgtcgaagtcgccgatgtgggggggggtgcgtctgggtacgctcttggttggtttcgggcgtttgggttcggcgggcagctcgaacaggggcttgtattctaatgcctcggcttcggcttcttcggctttggcgtcggattcttcctcgccggcctctttcgggaagagctcgtcggccagggattctactgggggagcgtcctgtagatttgattccgtcgagtccacctctgaataggtaggttcgggttcgagtgactcctctcctgggaacaggaagtccttttcgactgactcctcttctggatagaggggttcgtcttcgtcggcctccacggctgtctctgggatatggccgtcgatgtattggtctgggttgagaatgcggtcctggatggcgtcgatgtgggctttgttctttgtctgaatggcctcgatttgctcgtccgtgacgggctgcgcgacgatcaacatgtagggggggttaccctcgcgggcctcgaagtggaaacgcagggacttcttggggaacttcttcgtggccttgtccaggatcttctcccacaggccgagacttagttcgaattctttgtcgccaaggcaggtgttaggcgtgccgtgcaaagcctgatccatctcgtcgagagggatgtattggaagccgaagatgcgctcgatgttgtgatacgcgacaaagatgccgtccatgcggccaacgcgcacctgcagggaatacttgaggaaggcggcgcggatcatatcgaagtattcgcgttcgtaagactcccacttgccatagcggcgtcggatctcgtagcccatcccgcgctcgtgctccgtggattccatgcggattgaaactaccgcacgggttttcaagtcgaacatgccagtgcctggaagtctgggatcgtaggcgtcgagctgcgatcgcatgaggaatttgccgagggtgctgtagtggtaggactccggagtgtttgcttcttcctcggcagtgatcttgttcgcatcactgcggcggtagcgctcaaactgatcctttggcatcgtgagttgcttctccattgacttgcccagattcataagaatattagcgtggtcgtattccttgtccgcatcaatggcgtaaatatcctcctcttccttataacggaggaacatagcagtcggcgctcgaaggagacgggtgaacgtcctcagagggtcatcgaaaccccgactaattttgctagtatcgacaggccgccacgcggacagaagataatggaaatgagcgagaactgaagtcatgctcgatgacgagccgtagtacttcttcttatttttcttggtgatttcgcaagctgtctcatcttgtgaggaggtgatatatggcttcaaggcactgaagtcaaattccgtcacgggcatgatctggtccaggtaggggtcgaaattgaagactaaagaccgagggtcacgtagctggtagacaccaggactgtctgcttttagtatatcgatcattggtaggagacttagcaactcacttgaaaagcactcggtcgagaccaaaggcgacgcgtgggacaggaggcacggagacacgcacctcttgggtggaagattagctcacattcgacagctatatcagttccaaactcaccttttaggctctgctccgttgagtcaacagacccgcaatctttagacataacgtggtttttgatgaaatcaaggacttcgtcattgtccctgaattctggcctatccgaccacggggtgggtgctggaatatccaccttctgcctgggtgctggtttgtccgccttctgcgtgggtgttggctcattcgaacttgcaataccgttcttagagctggcgtccaatatttgggcaactacattgctagtggacttcaaatcgagcgtgctcttgctgggttcactgagcgctggcgtatctgctggtccgtctgtcgtaatcttagcattggctaagcgttttctctccttggccttggcccttctttcttgtcgtttggcatgtatatccgctgtccgcaaggccttgactttgtctgcttccaccagtgctgcttctatcgatactgcacccgacgtggcggcctctcgctgtgctgctctcgcccgcctcagttccaacttgtatgctgcccagaatgaaaggtctctcccggctataagtgactgctggaactctctgaaggccgggtaatgccgctgtttgtaattgctcttttgtgtggcagacatcccataccatattagagcagtgagctctctcggtttaggttgcaatggcgcgggtttttgaggtttggaagaggcggcatctttcgtgtcttggatctggccctatagcacactctgtcaaaactcatctcacgttgtacttcggatcgaaggacatacattgggcgctagcggcactgaaggttcggtcgacgcgtcaattgaatcggtcttcggctctatttcacctgaattggtacggagtgcagatatgcggtgaaactggcgcaaaccgagcgcgccagggcgcggcagacaagagagacagacatgtcgacttaaagggcctgacacagaccgcaaagaagtccgaagcattcaggtcaaatatcgacagttaatctgggaaagggtatagaaatgtagaagtccccaaatgttgtcgactcaagaattctagaataaaaaaaaaaactccgtcaataagccaccgggctaacctcagaattgcctctccggttttttttctgccaggagattgggggtcaccgctttgctgttatctcgttgccttggtgcctttctgcctttctgcctaaggtgtcaatattttatatcggggagaaatagaatagtgcgaacgatgagacgacagtaggaggtttggatgtaggttttgttttgttttttatatgcttcatattcaatcgggctataatatgattaaatgactacaaaatccatgtttcttagacttatattgtacaacatacaagagttatacattcgcaattgtatagaatcctgcactcttatcccttaacactaaatgaaagacatataaaatcagtcttgaactgtcaaatttgaactgtcaaatccagtaatccatcttctaattagaactatagaatattttatctcaccggccgagatcgctgggtagaattctggggtcggagaaacacccagccggagggcagaaaaaaagttgtgaaagtttaacatcttcgaacttcccattcccgcatacaaccttggaagttgcttctcaggtctctgtgaggtgagcaagtgtggattctcttatgatcaagtctttcccaactgtgtgccctgttccattgctcaatgactcggtttcccttgactgaggggcactaaataccccgcggagttcctatactaattgctaacaccaccacagtcgagacgcttctccaaccatggcctccgaacaattgcgcatccttattgtcggcaatggtggccgtgagcatgcctacgcctggaagctgagcgagtcccccttggtcgacattgtctatgtcgctcccggaaacggtggcacaggcctgggtaccaacagcaagatcaccaatgccaatgtcaagggcgacgactaccccggcctcgtggctttcgcacagaagaaccaggtgaacctcgtggtaccaggtcccgaggcacctctcgttgatggcatccagggttatttccaggctggtgagtcacctttttcttttttttttttttttcttttttttcggttgtttttttcctgcataccaatcgctttgaacaattctaaaaatgcctcacaaaaatagtcggtattcgatgcttcggtccctccaaggctgctgcccgcatggagggctccaagaccttctccaaggacttcatgcagcgccatcagatccccaccgccgagttcggaaacttctctgactacgagtctgcacgtcgctacctcgactccgtgtcgcacaacgtggtgatcaaggctgatggtctggctggtggtaagggtgtgatcatccccactaccaaagaggaagcccacaaggccttgaaggaaatgatgttggaccaccagttcggcaaggctggcgatgaggtcgtgattgaggagtacttggagggtgatgagctgagtatcctcactttcagtgacggttatactattcgctcgcttcctccagcgcaggaccacaagcgcatcttcgatggtgaccatggccccaacactggtggcatgggctgctatgcgcccacgcgcattgcgccgaaagaagttgtggatgagattgaccggaccatcattcagccttccgttgacggaatgcgaaaggatggtacgtttgatcgaaaatgcctttcccaaagcatgttcctaatcattgtctaggtttccccttcgttggtatattgtttaccggtcttatgatgaccaagaacggacccaaggtccttgaatacaacgtccgcggtggagacccagagacccaaactctgctacctctactcagcaaggacaccgatcttgcacagatcatggtggcctgtgccgaccactggctggacggtgtctcgatcaagatcgagcccaacttctccaccaccgttattgctgtcgccggcggctaccccaacgcttatgccaagggcaagaccatcactctggcccccgcacccgctggaaccctcatcttccacgccggcacaactctttctggcaacgagttgcaaacctctgggggccgtgtcatcgcctccacggccaccgccgcgacccttgaggaggctgttgctaagagttatgcaggcatcaagaccatcagctttgaggacatgttctaccgcaaggacattgcccaccgcgcgttccgccagaccgctaacacctcgctcacctacgcccaggccggtgtctctatcgatgccggcaacgagctcgtcaaccagatcaagagctccgtccgccgcaccaaacgccctggcactgacgccgtcatcggcggcttcggcggcctcttctctctacccgctgccaactccgcctaccaccctcactcgcccaccctaatcggagccattgacggagtcggcaccaagctcaagatcgcccacgcaattggtatccacgacaccgtcggcatcgacctcgtcgccatgaacgtcaacgaccttgtcgtccaaggtgccgagcccctcttcttcctggactgctactcctgcggtcaccttgacgtgcccaccgctgcggccttcgtcaccggtgttgccgagggctgtgtccaagccggctgcgccctgatcggcggcgagaccgctgagatgcccggcctcttcgtcgacgactcctacgacgccgtcggagccgccgtcggcgctatcaacaccacgggcgacaacgctcgtgccatcctcccgcacacagaaaacatgcgctctggcgatgtccttctcgccctcggctcgtccggcccccactccaacggctactctctcgtccggaagatcgtcgagcgtgccggcctgagctacaccgacaccgcacctttctccatgcccggcctcgacgccggcgtctccgtcggccgtgccctcctcacccctacccgcatctacgtcaaatccatcctcggcgcactcaacacccacggctctgccattaagggtctggcccacattaccggcggtggtctcaccgagaacattccccgtatgctccccgacaccctcactgcgcaggtcgacgtcagcacctgggcccagccttccgtcttcacttggctccagcgtgccggtaacgtctcctctgccgagatggctcgtgccttcaactgcggtgttggtatgatcattgccgtcgaccccgcccacgaggctgctatccgtcagaccttcgaggctgctggtgagtctgtgtaccgcgttggtgagctgcgtgctcgtgccaagggcgaagagggctgtgtgctgtctggacttgagtcttggtctgcgtaatattcacgatcctgacgttaaaatttgatattgatggtgatgttgatgcgtgatgctttttatatatggatggagaaaatgatttgcctgggttatctacatatcttatagatttttttgttactgtttatttttctggttcttcgtattccccgtctttcttctctgccttttataatataggacttttggatgagtcccgaactaatggattttcctacgtgcatgagagtatatatattggaaaaaaagtcattgatctatatatccaagatttctgtattgttcctattcccagcatatctgattgaatgcctgaaaatatatatatcggcgataaaggtctgatgtaaaaaggctaaaacaacgatgctcgaaagtcagtaatgcataatagacaccacgattcaacaagcgctaaatctctcaatagcatttatagaatacaaaaaaccagtggatggaatattcgaagtcagagttatgttaaaactacggacaaaatcgggcaatttagctgaagacaggctagaacaagacggacgatggagacgtcaagagaaaaggaaaacccaacctattccccatagccaaccaactccatatgcatcctcaccctacaggtacactgttgtcgccccagcgccagaaactcgtccagtcaaacaatcagagaggcggacgggacagcgcattcgaatgaagaaaagaaatggagggtaatggtaaaatgtttcaaagcagagatggatggataggaagatcgaggtaaagagtaaggtaaagagtaacaaaaaaaaacgatcgactctattccactaaaatcgagattccattttcaggctatccgcttgataatgcgagtccaacaacgcttgcaatccaccagtgcctccatcctgctttttgatacaccaggaaagtacgagtgaatacgagtagaaaagtgcaacaagaagcttagaagcacttgcggtggacgatggaaggaccgctctcgtcgtactcctgcttcgagatccacatctgctggaaggtcgacagggaggccaggatggatccaccgatccagacggagtacttgcgctcggggggagcaatgatcttgaccttcatggaagaaggagcaagagcagtgatctccttctgcatacggtcggagataccggggtacatggtggtaccaccagactaaaagtgtgttagtgggatgttgcaagttcaaccggggagaccttttcttaccatgacaatgttaccgtacagatccttacggacatcaacatcacacttcatgatagagttgaaggtggtgacgtggataccgccagactcaagaccaagaacgtttggctggaacagagcctcgggagcgcggaagcgctcgttaccgatagtgataacctgtccatcaggaagctcgtaggacttctcgaggctggagctctgggaagcggtctggatctcctgctcgaagtcgagagcaacgtagcaaagcttctccttgatgtcacggacgatttcgcgctcggcagtggtggagaaagtgtaaccacgctcagcgaggatcttcatcaggtagtcggtcaaatcacggccagccatgtcgacacgcgagatagcgtggggcagagagaaaccctcgtagatggggacgacgtgggtaacaccgtcaccggagtcgagaacgataccagtggtacgaccggaggcgtacagggacagaacggcctggatggagacgtagaaggcgggtgcgttgaaggtctcgaacacgatctgggtcatcttctcacggttggacttggggttgataggagcttcggtcaagagaatggggtgctcttcgggggcaacgcggagctcgttgtagaaggtgtggtgccagatcttctccatatcgtcccagttggtgacaacaccgtgctcaatggggtaacggagtgtgaggataccacgcttggactgtgcctcatcaccaacgtaggagtccttctgacccataccaatcatgatactgcgcccatgttagtatatttttattcattgagaatcaaactggctgcatggcgtatgtgtccaaaagccaaaaagaaagggggggattatttacccatggtgacggggacgaccgacaatggaggctgttgaatttggtcagttatttgatcctcacattcaaggtttccagccaagcaaaagaggggaagccatccgacgcaagggttggtgggatggcggccttcgcaaaggaggggtgtcagattctgtggggttggacttacggaagacagctcgtggtgcgtcgtcaccggcgaaaccggccttgcacatacccgaactacatcgcaaatcatcagtatcataattcttgtagttttggaagcgccatctcgtaattgtggagggagatggaaagcgattgggatggattccatctgccgtcatgtgggcgaattaggggtggcaacgaccgcgaccgggctgatttggtgaccaggccgaaacacaagccagaagctcccgggaaaaagcatagcacatacccattgtcgataacgagagcagcaacttcttctataatgagatatccgggttagtggtcattcgcaaatgggattcgagctgtggcaacagggggcagcttcctgggaagctgctgatgtggccacatcagaataacataccctccattgtgacagattaaacaatgaacctaagggagagggggggatagaaaaagaaaagaaagatggaatgaggttagaggggggatatagttgggattaggggagaagggaagaaggaagagagtgagggagcgagaagagtggagaggggtttgtgatggctgggattgtgcgctgcctgaggccgtcgattctcttttgaccccctccgatctacaggttttggccgtttcttttatatttctgatatctacaagttcaggataaggcagaactattttcatctcattattgcactgtctcggacccctttcttgtctacctagagcattgcgtggacactcttaggggtgagcctccagacccctccggggaacacgtaccttgaccgggttaggcactctagagtgtttagttgtattacagttattacaatatcagacatgcgacaggcatatgattgtatatcgtactccgtacatacatgtaggctacgggattccctgtggcgtggatgttctaagtataggacagacccagacttcagtcattggggtactcccgttccaaggttatttcaagtggacacacacgcatatacggctgtataggggataaccccttagaccgtgagactctgacactgccagataatttacgtcctcaggttgttaccgctacttcaccccaggcctaaggtgacaactaagcctgttgtaatagtgagcggtgaggtggtgccacgtgacatcttgggaagtacgagatgtacaccttcttttctccctgactacccctgactttgtctccttatttgcggagtaggtatctcctgatttatacatcaaagtactattttggaaaaccagcctatgctgaccatctccatggcagaaaacttggcatttgacccctccatcggcaataaagtcgctgaactttaagccccttggaatatatcttggcagcagaccaggctttgataaccgggttctagtacattccgaggcacgttgataaaccggaaaaaccatggccgagtagttctattgacatgcagccaatccgcagcacaagtgtttgattattcatctactctcactgcttactttcattgctctcccctcattgctcgaggaatatcgtttccgaaagcctgaagttcgctgtatcggaacaacgaactctacaagtgctctagtcggtctctatatatcgagtccgaaatggctaagctcaacggttcaagagaactactagtacgtagtaagaatgagccattagaaatcacattcatgccattcaaaccgccgaaacaagacttggtgataactcttttggctttcccaaggtcgttttagattttcctattcggtagccaagaagaaagaagacatcagtctctgcttcggctttctagtgacaactccgtgttgtgtgtagtcatgatgtagtctagttgggatgcgatcacatgatcgaacccgctggtcgtcgcgcgaatcacccagagccgtggccgagacgtcagattatgtcagcgggtcttttttctaactgtagaaaagagtattgatagaagaccgcggacaatactgtgcgataaacagcaattcaatttctgacttgcgtcatagactctattcatactctccttctttcctccctccccaaaccaatactacctaatcaccaacaaccaattaccccgccagcccaccatggaccccgaaatgaacaagctcctcaaatggagtgttgccaacacacagccagctgcaggcgccgatgacgagagcagcagtgcccaaagtcgcccagcagctgcgtcaaacctgaccccacaaatggtgaacacactattcggcggtccctccgaggccgacctgatgcgggccgcaatggaggtcgtacacgacgacgagtccgacctggagaacaagttgatcgcattcgacaacttcgagcagctgattgagggaattgacaatgccaacaacctcatcccgctcaatttatggaagccgcttgtcgagcttctccagcacgacgagactgaactcagacgtatggcggcctggtgtgtgggaacagccgtgcagaacaaccccaaggcgcaggatcatgtatgaaaactcccgattgacctacaagcatgttgaccaaatactgacacatccacagttcgtcgagctgaaccaaatgcctactctcgtcaatctcgccacgacagactcagaccccgcaacccgcaaaaaggccgtttacgctatctcctctgcggtccgtaaccaccagcctgccttggatgctctgcacaagagccttccagaaggctatcccaccgataagcgcgatgccgccgatatggaaggcattgatacgatcatcgatcagctgcggtctcacccgaccgaagcctccgcatgaatggagcgagttgtgactggactgaaagagtgaatacacaaaaatacagaggcagcagggtacccactgaatgcgagtccgttcttggaactggccttgtatcgtgccaagggctggggctcgcaatgcaacaggcaacatattatgttgctactgcaactgcgttgaatgctatgatgatgacgacgctaggcttcactgctggtaaatgcctgcgattatttgatttgcggatatccgaaatggttctgcaatggtttcttgttgcctaagagttgcatcaacatgaaacaacaacctgattttttgtggttcaagcatagatttgaattgtacataccccggggcttttgtcctacattgaatgcaatcacgagttccgacgatcaagaatgtcaaatcccgatgtttgaatctgtacctatgctgcctaaactggaccgtttcgttgtagcagtatgccctaaagaaccaaattcacactgtattgtagctcattaatgaaatatctcaagaaaagcagaaatgaattcatactccgaacaaattagagctcacgttgccttgactgatgatatccatagatatctcggaacaacatttctccaccagacatcgtcattggacttcagctctcaccagcaacatccccaaccaagacccccatcccccacaatcccaaaatggacagctcaagcaaccgactcttccgcttctccaagccagagtggctgaacaactccgccgtccgcaatggcggcgtctacgtggcaggcgcgctggtaagcatccgatccacctccggcctcacttgctcgtcgcagacaccccaagcccaaagccctcaactccaaatcaaaataaaacagaattgaacataacatctacctcaaacaaaaaaccaaaaacccaaagagctagaagctaacaaaaccacagttcgcagcaggcttcttcttcctaatcgacgtcgcggcattctcgcgcagcccgcgcaacggctcagacgtgcatatcaaattcgtcgactggatccccggtatctgctccgtgctgggaatgctggttatcaactcgattgagaagagccggctgcaggctgatagctttagttacagcgggagtggggttgcgtggaaggcgagatttgtgctgtttttgggattcgcgttgcttgctgggggattggctgggagtgtggtatgtatatctctttccccctcctactatactacgctttactgactcgcttgttcgtagacggttatggtcctcaagtacctcatcaaggattatccgatccagacgctctactttggaatcgcgaatattgtggctaatggccttgttatgctcaggtatgtgtcttgtctgatttgttattcgagttgtgcatgcgtgctaacaatgctattctcgatctagctctatcgtcctctgggtctctcagaacattgaagatgactacacctacaatctggcactgtgaggaggactgtttctatctataactggtctttgtgtattctactcgatttttgctctgatgactttttgctgggatgcattatgctttcacgtcttttggctgggattggcgctttagcatgaattcattcacattcctcaatgttttgcgtgttctcaagttaggagtccttattatgacagcctctgaaatatctagaataccatggtattctataagtaaacagtaaagtaaacattatcgagagaaaagtatcatttcagctatgcatcaagaaaccaaggcctaaaagaagcccccttgaacaccagatatgcattcataaaatcgtaaaaatcaccattacctcggaccctcaatgctcctcgcagaacaacctcagtaactcatcaatgcaagtcatagccttctccttcttcaagactgaaggcgccactcccggtgcctgcttcaagtacctgcggagcgcaaaagcagcagctttgtacgtcgcatggtacataaccttgaactcatcatcatccgaagtgatccccggtgccggggtttcagcccgcaaagcctccggcgtcggcgtcgtgcccgagacatcaagttcaggctccgcacccgcaccacctggcggcttacccgacgcagagcgcatatccgcacggtggaatccatacagccgcatacaagtcaagacggtgcgcgtgatgagagtcttattatccgcaatcacagcatccggatccttagccggcgagcctggcgtggacgccggtttctcctcggagaccgaaagagatgacgggccctggccctgcgacatctgttctccacgtcgcgggccagaatccaagcacgggttcggagtaggcgcgcgcttttgtggatcggcattcagggctggcgttgtgcggccgcgtacgctacctgggcgatgtagacctgctccgatagagacggatctggaccggtgggagacgatccggtcgagagacgggagggtgggtccgtcttcttcgggctcgcgcttgatgcggagtgtttgtaggttctgggatgaggaaagaggtcgtgaaggtgccattagttgtgagacggcttcgccgcctcgctggcggacgcggcggtggtgctgtgcgactacttcgaagagcgttgctactcttttgcgtttggggctgggagagcttatgtctggtaggaactctgcgcagcgcgggttggcgatgggttggtccgggttggagggtggtggggatgggtaggcttgggcttgcgtgagtcgtgatgttgatagtggcacggcgtagattctgagttcatatggagcacgatgtggtctatttctgtgatctgggatctcggagggggatgaatgtggcggggtaggcgggcgtgtgcatgatgctgcgctggatagaacgccgtagactaataggcttgttgtggttgcgttgcctgatttggtgttgccttcgacgctgaccagcagacccactgggcattggaatgattgttggagtgctggatcttcttcgttcagccatagggcgcctgttagcttcctctggagccatcttgatgtccccgcgtgggatgtgtgtagttcgaggttaggaccggcgcgtgcatgcagtgggatgagtgctgggttcacgaagctacggagattgagctgggactccttggatagctcggactgtgagtaggaatttggatcgaccagtcgaatccctggtcaagtggttagcgaggaacaggatgcgatacgcgtatggcttaccttctaacttggagtccgagccgagaggaatggatcctgtccagacattcatcttgttaactggatcccgaaaaggcctttcatgggttcagcatagtgacatcaatctggtatagttgtgtcgtttctaaattgatctgctgttatctccgaatctctgcagacgcgccgagtccgcgcgcggtcacgtgtacaattaatagaccgaatatatcagtaaggtaaaaaggaagcagtaaaactaagtagatttggattcctcgtttttcagaagaattctctatatccattgcgttatagtacacctagagtagcacagccaggtgctggggccattgccatttaaagtgaggcacaccccacaccaaatcactcatacatagcatatcaagcatatcaagcgtacgctgaaatcaaagaaacagcagaaaatcagatgtcatcgtgaaggccggataccgtgagggccactgggatacagtagaagtatagcccttgaccccgcgcctcatccattctggacgatcagaactcctcctgttcctggaagaacatcgagaagctaataatggtgccatagatcaacaagcctccgaaaatcgacatgatcattgctgggatctcgattgcgccgctgtgggcgaggacgacaggaagtgctagacaggtcagttgataatcatcaatggcacaatgatgaggcattaaaatggacatagtgcggcctgaacatcaagaaccgaccggtcgagtgatgatatgtcccacaagaggggttgttgttaaccaacgacgtaccgataccagtaagaaccaagaatccggtcatgaaccgtccaaagtccatcgcagagttgctcgaactgtccataaaatcatctgggtttgcgcatcgttggcagatccagttgggaagcggcgcaacaacgtaaatgccgaccaccagcagcggccagtacctgtgccatagcgcggaagagaggataacgaggaggaaaccaattgcgagaacctggtcaaaagttagagaatattcagatgctaggcgaacagcgaaacgaagcatacaaaggacagggcgatgatggtcttgagtccagcggccatgattgcggagacgccgaaagccgatcgatgagattaaagatgggagacgcaggagccgttgaattaggtggatccaggagacgatattaagagcaggtcaacaatggcagccccattggctgagtgcgggaaatcaaagaaggacagtcgtgcgacaagctggagatgagctcgagaatgagtgacgttggcgcctgaaggtcactggatgttagcgcctgaggcaccaacagctcatgcttcacaccgcgtcactttactgcctgctccagctcccccatcctcctccatcaccggattatccctcggattcttacgtcgctgttcctgaatctctatttatcaacaataatccactttctctgtttgctttgatatccattcaacccttcccgccacgatgttcagaaacaattacgacaacgatgccgtcaccttgtaagaccaggtgctccctcggattcatcagatgctgactcaaaggatcctagctctccacagggtcggatatttcaagtggaatatgcacaggaagcagtgaagcaaggatccgtcgtcgtggggttggtgaataagacacatgccgtgctggttggactcaaggttcgcatacctacagcagagaacgaacagaccaaaccgtcaaaactaacatttggcatctagcgcaacgcagaagagctctcctcgtaccagaagaagatcatcgagatcgactcgcacatggcgatcgccatcgccggcctcgcatcagacgctcgcgtcctctcaaacttcatgaagcagcagtccctgggctcgaagatgacctacggtcggcccattcccttggaccgaatcgtcgcccagatcggcgaccgcgcgcagaccaacacccaacactacgggaaacgtccgtatggtgtgggtttgttggtggccggtgttgacgaggccggcccgcacttgttcgagttccagccctctgggctgacacacgagatgcttgcttgtgccatcggtgcccgttcgcagatggcacgtacgtatttggagcgtaatctcgacaagttcgaggactgcagtcgtgacgagctgatccaacatgggttgagcgcgctaaaggagacactgtctcaggataaggagcttacagtggacaatacttctgttggtgttgtcggtgtgactaatggcaagaaggagagcttcaagctgtacgagggccaggacacggctgtgctactggaggtgctggagcagcgtgagtccgctggtgcggagggcgagtccatggaggttgattcataaatgtctggtttgatttaatgattcgcatagacacgaaattttgataatgctttgtcttgtgtttgcgtccaatgatctcagttatccaatcatcaattcataaggctcttctcaacgaagtaatctatttgtatgcctgaagtctttcactgccgaaacccgaacaaatgcgaaacaaacccaaacaaacaaaacgacatctatatactggtaccccattgcttgatgatcaaacagagcagcttcattcctctccccagttcaactgcatccgccctgtgctgacccgataagccagcaacttcggccagacctcagagacctccttggcctccgcaaggatctctccattactagcactgatatacccctcttggacggcattgcgcacccaagccaacaagccatcccagtagccattgatattcaacaacacaaccgcaaccttatgaatgcccagttgattccacgtcgtcatctccataacctcctcaatagtgccaaacccaccagccagcgaaacaaacccagacccaggcccgccctcaaggaccttcgtggccatcagacgcttgcgcgtatgcatgtcggcgacaatggtcgtaatgccgtactcggactcggggattccaccggtatgaacagcatcagagtcgaccacccgctcggcagctttgccggcttgcttggcagtggactgggtttccatgtgctggcgcatgccgccgactgttgcgacttcgactagtgcacgtgggatgatgccgtgcacggatttcgggcccgagagcgagactagcgtgcgcgcaacttcgcccattaggcctgttgtgccgccgccgtagactagttgcacgttgttcttgtggaattcttcggcgagcgctcgcgctgcttccatgtgtactgggctgttgcctggtacggagccgcagctggaaacccgaggggggtttgttagtgtatagttcaagacatgaggtacacacgccagactggtagacgatacggtgtggttgtggcattgaaagtggtggtgaggggcacgactcacaatacacagacgacagcgggtttggtctccgagtccgccatgttggtatggtaattaggggctgagtgtatgaacaatgaagaggtcttggaagggcgttaattagagaagaaggaagagaacagcaagaggcaagaggcaacctgggaccaaacaggtaatcccccactccgataagagataacgtagtacacataacatagtataacgtcagggctccgactttgttcttcaaaggaccttttgatgtaagatttccaaataaatgcctctatatatgttatatattgcagctcgattttgtgttgtatgtttgcgagagtccagccactagttagtacaacttgaattaactgactagggcttgtgtacggctaaacaacacaacagctgggctttttatatcaacactaaacattcagtatgatacttataacaattttttggctatctaggttgtagggacatgaggctgtgatcggaataagctatatagtcacagatttatacttcttggtacctcaaaagccaactttatttaggtacactcgatagcttcaatattatgtcctcttctagttattgctattagtcaacttcatagtactataactaggtcaaaagaagtcgaattaatactctttgtttattctcttaatgctttttgagtccatgcagcaacttgagagtttgttccaccgatggagtataaattcacctaaaaggggattgttaagatcacaagagaaaattgattccattgttttccgttgccatggcttgaataaaggttgttcagtcctagagacttgttaaattgccatttttgtttcttatgttgagtatcatacatggaagcctatagaacaatttgctcttatagacaacttgattgttgcctgggtctatatataaccagtcacttgcccttgcaatacaggatgctcctcttcttttattgattgtcttatagtatactggctatttatatgtctatgcttatatatatgtctgtgttgaaatacgatttcatcaattctgtcaactctctccatcatccagggaaagcctcagttatatgaggtacctggaacaagttttcctagtgggaatatcggagtttccaccgtttctctcattcaagataaaggggcgacatggcgatacaaagtttgacggaccgatactgagtccctcacctggtttcacctttcaccacgacggcaaatgctgtggctccttctgtctgtcatactttaggagctgtctatttccacactgtgctgactgtgagccaatgattcggacatggaattcgtaggaagaaagaagctatcttccttgcttcctcatgctcaatcatcagcactgacttcaagacggtgtactcgtggaaggcatttatctttgccatcttcacactgctgccgtgggatatgttgatgtcgtcggacggcccttcgtgcttctggtgctcgcgtggcgcttgtgcgtgccgtcgagcaggatgtgaagtgtctttcccgttctgtcaaccaggcgaaaaaggctgccgcacttgcgctagagccgtctgcgacttctgaggcggaaaataccgcagcacccgcattgaaagagtctgtgacttccgaggaggagaagttttttgatgctcccacgcatgccgaagtttcttccacttctgtctcagacttacagaaatgcagctatgcttcacagacgcgcagtatacgcacttcttgatgatatcaaatcgggctttatcacaacgcagtgcccacaaggacagtgataaacagagcagactcattattcaagaccttggtacaccaagtatcaatttcgacactccattttcatctttggatatgcctggctctcccttctatcctttacatctttagctatgcgactactaggccacagagaaggcaccgaaaaagagaaagatgagctacagcagctaaatgattcgagagacaatgaattaaagctcagcgatcaggcaaagatatgtatgccaaactcggctgatagcccctagataccagtccctgtaaatgctatgcccagcacccaaacgcctagagatgcaaaaaaagggtatcaagtaaacaactcagctgacgatccgggccttcttcctcttccccttatcacttgtagagctaggcggcgaattgctcttatcggaagccttaccaggcgtctcgacgcggacctgtggcgtcgacgctctgacaggcagggtagaaggcgtactagtcggagccaaattagcagcggtcttcggcgcacccttaacagccgaggcggtagcctcgccgccagtccgtgataggatgaacgatcctggttcgccgacgagggggctctcgtccatgaattcgtcgccgtagcgcgtgagcaggctgaatgattcggctagactgcgcgtatcttgatatttggagcctgtagatgagccacccaggcctgatttactggttgattgggaggattcggtggctgggaaggatacgtctggcatgggtgttgcttctttgctctggggggcttggctggttccggcgggctctttgctgcggactcccggtggcaagtaggtgtgtccatgggaggcagtgaatgttggcaatgtcgcagcggatttcatgagctgggttagggatgtgacggctgatagctgcggggaaggattcattagaatacttgtctcggagcggttcgtgagttccgaggcaatacatacaattcgattccccacaacactcgcaaccgaaggggccatgtagatgcagtcgccgacaatgaagtatgtagctatcacggtcacctcgtcgtccatgccgctcctcttccgccggttctgcttgcgaatcacccagatgttggatggctcgtgggcgaagcgtgtgtctgtctgtgcggctgcttggagggggtcatatgacacgataaactccagaccctgcattgttttcagtcgggcttcgaacgcttcgcgcgtctcgacgaaatgacggaaggcatcgttgtagttggcttggatggcgagcgaggcgttgttggaggtcgcatcaaagaaaggggattcggcaaagtaaaatagaactaattgacgagaagattaatctcaagtccaggtgtggtaaggtgtacaacccactgttgttggaatgaaggaatcctcccatcatctggacgtgcgggggagaccgccagaggatctcctccattgaggcatcttggttcgccatttgcgactccggaatgatagaccggagtcaactcggtctatcaaagctcgcgacaagctttatttttgaaaatgacgcaggaggtgcaggaggtttaaggaaaagacgcagctcggaagttgaggctgcggagaaaattatgtttgctttgtttgcatgttgacagtatatgatggcgacgggggagaaagagctgaatatacgtacttctaatttctacagttaaatggactatatacacatatacaggtactgatacaataaccaaaggcaaccaaaacgccaacgccaacgctgaatgttgaatcaaatcactatcccatcgcatggatccggttgttgaaagcagggaaaagcatggatcataatgcgatcaagcataagtcaagatgaccaataaacaaagctgcgccgaatagttaagaagtcgtagctgatctctcgtccgcatcaagcggcgtgaagacgttgcaaactacacgcagtttggtcaacatctcatcccattcgccctccgctgtgctgagtgcggtaatggcacccccggcgccgattcgccatgtctgctgcttattctcggtgtaatctcgaccaccagaacaagtgaatgccgagcgaatcagaaccgagaagcttccacctccgccaaggtccaggaaacccatcacaccggagtaaatgccacgcttgcgattctcaatcgtgcaaagatgcatgcaagagcgttccttaggcgcaccagtcatagatcccggtgggaggcaccgctggagggtggtcaggccgtggacggacatgttgggggtattcaggtgagaaatatgtcgcacagcgaaaccaggatgattgggccggatcttgccctttatgtgtgtgatcattgagtagactcggccgtaatctgcgacttcgagcagcttctcaacatgaacgccacctgatccgcagatgccgtacagatcgtgccggatcaaatccgcgatcatcagattctcagccatctctttcgtggagccgaggatctcacaggccttctccatggtcatatctggtgattttcggactgtgcctttcattggcttcatctccagtgtcgattcacggtcccaattgaggaaacactcaggactgctgctggcgatctttgtatctcctagatctgcgaaagcgctgaatgcagcgggattgtatgttttgagtcgtctgtacagcttccaggggaacatcaaacgatccgactctaattctggaactggcaatgtgattttcgtctcagaggttaggcataattcataagattcaccagcttccagctccgctttgcatgactcaatttgtcgtttgtactccttttcctcggggagctgaattttgctctcccggagaattgagtccaagccccgatccgcagatgtatcattgccactgtccgaaaagttttgcagctgctgcagtgtctcatcaagccaacccgcatcatcatcgcgagtggattgaataacaacagtgccagtagtattgtcaaccacgacacttctttcacaccacagaaggctgacatcgggtggatccgcaaaggaaggatcagatttcccggtgctggagtgcttaggtgacttagaagcctgcgcatggcccgtgtgaggaagacaagtgagaccaagttcgtaggagagataacccaggaagccaccccagaatggcacctgagaatttcctgaatcaactttcttcatttccatcaaataccgtaaggcatcccacaattgagcgactgtaagataactctcaacctctttacagtcgccatacagctggagcattcgaatcttatctgtctcaacattgtattcaaaccgccatgagccaggactcggcaccgatgcgatactgtattggccattggattggaaaaggactgctggtgaacctggtttgttgaacacttcacttatagcctcggcggtcaaactaggccggtcgagggaccggaaagacgaaattttcgaagttgacttgctccagttgaacatatcataagcaataccagggaatgcactaggggctgtgtgggggctgatgactgtgctgggaagggaacaatatcccccgcgtccaacgagcttgttgtatccaagagccatcttccaccaattccggagcagtgccttgcaggcattgatttctgatttgcaggattccgggtggaattgaacaccccagaatggcttctcaagatggcgaaccgccatgggtatctgtgtttccggacgatcctttagagccagccaagccaaatattccaaatcggtcgatgttgaagcagccgagttggcacaaagtgagtgataaagcgtcacctctacttccggtagatcctcaaaaatatccttagccgacgtggaaatcttgtggatttggccatgaatcgggtacgggagtcgttcgatgggaacgccatgatgaaggcaaaggctttgaaagcccagacagataccgagaactggaaggagctctgagtcatgaaggtcccaaatatctttcatgataccgacatcactaggcacgttgggatctcctggtcctggaccaagaacgacagcttcgtagtgctggagaaactctttcatattggaattgggccattctgaatcgatagtcattattgtgactttgacccccagggtctcctccagcatggcgacaacattgtaggagaatgagtcataggcatcgacataaaggatgctcttagtcgaggagctgggatcaagttgcggcactctgctttcattgtttggggcatcccaatcaccgagcattggtgccatgctgatgtttgaatttgatggcgaactataccggagaatttcgacgatcccggaacaagcactgggatcaaatcaaatctcagtgatcaaagctcatctgcatagcagatcttcaatccttagcgttgaattagctactcggagcaagtttgccgcttatctgatggagcgcgatcgggagtggcaatatgctcagaacatgtcccaacgaagacaacaaaaaaatacttagaagtatagccttcaaatgaggacgttaaccatgaaattgaagatgcgagtgtgctaacaatgcattgttgttgaagcaagaaagaaaaaaaattaaggttgcgagataaattcgaaggtcaaaagcgggtaccgacggaagtctcgcggatgtggcaatggagggcaatggattttgatattgggacattttatgagaatgactttggaagatcttgattattttacttgaagcccttgaataataaaatttcggtgagaagaacaatgtaatatatcaaatactactctctgtaagctcctcaacaacgcaagaggtatatatagccacgaagttagacctataaatagacattcatacagggtctgggttgtatcatcctacatgtcagactatagagaacgagggacaaataactagagtgcatgataccggtcaaattccaacatgaggtgccaatatatcataaacacatttatgggaggagatatccttgaaaggattttcacattcactatttgcaaagaaaagaatcaaaatatttaattagcaaggctaatgcactttccatccgaatagaaaggccaatagtatttatcaaggcaaaatatcaagactgtccaggctgagcagctggggctggcgcctgcagcgaagcgagcttgacagcaaccttagggaaatattgcgtcacaaagccctccgtgtagaagctgtgcgcagaactgtgatctccgactaagttgtgcgctagctcatggcacagaatcacccaccaatacacaatagcatcagtgcgatctgggctcgggctattgagtagctcctgctcttgcaaagactggaagtaaaagtagttacagaaaatactgcccgcgcgattgaatgcgatcgtcttgccgcccgggtcatagaagatggtcaggctgtcggcccgcatcgagaagatcatgccacagtcaaggaggatagacgcaaagaggttgaacccaatgcggtttttcgcgaggaaggcagatcgttcggtgactgcctttgtgaagaggacgttcatgccactagggagcgtggcgacaaattctagatcgtggcttgggcgctcgtcacagtaggacttgctttcttgaatttgatttgtctctgggcggctgtacacgtcggaggatccatgaggtcggcatgcttggacggcggagagaagctcggagttcaatcgatgcggcgaattgccatttacaggttgttctgggcgtttttgctgagtctgggggtcattgggggcgtaaggcggtggaggtgtggaagacccaggaagcagagatcgggattgttcttcagtgccggagtttgagcctgacggtctaatatctaagccaaatcgtttcgatagattgccaaataagcctctgggtcgcttcggcattgtctctgggggaacggcatgtgcttcttctgacaaggtcttctcgtttttcggggattctgggaaaacgccaggcatcgaattttgtgtctgtgcttcggccctctcttcgtcggccagttgagagtcacgctgagcttgccccgccgcccaggaagcttctctctcttgcaaagcacgcctctcctgctcgatctgtttttggcgtttatcttccgcgacccgagcttcttgggctttttgcttcagaatacgttccacgttgtaacctcgagcccggagttctaagagatcggtcttcaatagcatttccaatgtaagggtagagtgcagcttcggtcgcttcaaaatcaactgcaccaatgcctgactgatctcatacaggtcgtatcgatctggacagatgcataagccaacgcctgaggtcagccgggcgacaatcgcattctttttctgcgtgtgcgacacccgtcgtcctttcagcgatcttgtaagactgatcgatgtcacaacctggactttgaaggaatgctccaaccatcgggctccatgcagaacatagtctgcgggctgatcatgcaagaaaagccgcgcacgctctaggatcaatttctctagtttgtatgcaggggtttgatccgaggcgatactaccaattcgtgcgtgttcttcaacaagtccacttaagggtatagccccaagagtagcgtagaagtcctccaatgcctcttcttgtggagcggcaaaaatgtgttctttgaaaaggttgaagctttggaaatcgtctaccacgacaatgtctttggcagaggcaagacaccattccttgatgtccatatcgtcctcctcatcatggaactccttcgacttttctttgccaccatggtctgacgcagagggtgggatgtctcgactagcaagaaggaattttgctctctgcatctcaacaaaaagatccttatccttcttcagcaccgggagcacctccgcgagagtcctgagaagcatgagatatttctccgaactttggaatgctgcagatatgcgtgcgggttctttgaccaacatgcgtgcaatctcgatcttagtcggttctcgttttgagccgatggccatgaggaagagatttgcctcctgtccaaaatcgacaaagtcaaatatgtccttgtagtcctccccgtctccgagatagcacagcctaggggccacgagccggtatttggctcccttctctgattgatggtggatgggaattgggattataggagcctggcaaatgcggtttatatcttgctgttttagatcagatattctgcccgccaggtatttaaacacaatccgtgcatccctctgcgtagtcgggggctgcttcgcgagaatttgaagacagtctgtcatgggaggatgagccttgactcccagtctggaggcatgggggtggaggttgttcctgagaattttgaaaccgaacaaggcagcaccttgatcggtaaagcacttcttcggagcgcttaagctatcagatccttcaatgggaaggaacggcactattaccgcactgatatcaaacgaaacataaccatttgtgtaatactcctcgaggaaatatgacagagccttgcttgctcgactatctttctctgtggccccggctgacatgagcatcactagttcaacagctgatgggcagctcttgagccccatcatcgtaaggaatttaccctcattgctgctgctggtataaatacccggccattcgataaccggtaagccgagagctcggagcgcatccttcggctcataaagctcggaaatcttgtaacgtgtgccttcgatgccactaccactttcggcagtacagatgctcgtctcctttagtctctgaatgtcgttcgcaggaatatcctctcgtacagaggcaaggtagcggatgagatcaacatgattccatttctttgacgcaggacctttcaaatcactagatatcggagtattgatcagacgctcaaagatcacaccaagctccacggttttgcgaactccaagttggaccaggattttctccttgacaccattcaggccatgaaccacaggcaggtcgtcaaaaagacgcacagaagcaaaatatgtttgtacgggctgcttcattccaagtttcgtggggatcacagtctggggttgaagtgtggcgacgatactttgctttgaagcttgactgagggtttcccactgctttgacaaaacaggcaatacctggcccgaaaaggttgctgactgcgtgatatcttgatctattgagaagatactgcgatttccgcaatttttgacgatccagctaagccaaggaacgatttgcagctcgccccagccaagtgcctccaggtcatgcttgttcaaagacttggtgaatctgaaaggtatcacgctgggcggtacgggcagttccgctggaatgcgctgagggttcaaaaaacaggtgatttccgcaaaaataatcaaacgagtgactccatctttgtcctcgtcattagccactgctacgcgtagtagactctggaccgaagagctatcaagctgaccagcgacggctttacggccaagccatgatatgaattcaaggacttggttaggtcgcaaagtattggactctaattcacgcttgatgtctgataccgtaacttctgtgaccaacccgaaatcggtcagccttttgacaaaatctttagcgccctgtaaaaactcctcaggcaaagcagaaattgagtccatgaagctgagatctttgggtgcgatgcgcgtttgatgactggggatgacaccacaggtagaaaggacctcaatagaggcattcttgttgcacatccagaatgcatcttcgattgtctgtcccaaaacagaagatggggtagattcacggaatgcaaattgatttgcagtatgaatagcctctggtagtacatccacaatgtcttctttccgaatcttagacgagcgtgatggtccaactctggatgcaagtttcgattttatggtagccatctctgcagaccaagcaattcgacaaacaataccgactgcccgcaacatctcgagattccatttgctgatgtaccgtgtgttcaaatctatgctctctcgctccacagtaggaatgacagatggagcagagacatgggcattcaaaccagtcgtctgcgctgtagggaacccaataaagactcttccaccctttgagggtaatattgatgaaagaatttctgactgcgatgaggacgctccagtcgccatgttggcgtcgtaagaaggagttagaattgcgagggttgccttcttaggtggaggcttccgtgtggcccgttccaattctttgctcagttctctactaatagatggttggagcgatgccgtgttgatatgcaagaagaccgatgctgagagcatgctattcatgttgcctgaatctttctggccctcaggttccggtttctgggcattggattgtttctcgggtgcactttgcgtgaatttagagaagaaactcttcagcgaacttgttgaatctcgaaagttatcaaggcggaacaagcttgcattgggattccattccacaattcgcatccacgaagcgtccacctgcgcgatttctcgagtgacattgacaattctcatcaaaccctctgcagttttagtgtcaatgtctctcggaatcgggacatcgacgctgggagccgtcttcttttttgatagccgcagaaggttccaatcatccaaccaaagttcaatctcttgtagtgagacaaacgtcaaactgctcgacaaaaattgacagagctgcagcaaagatggaaccggggaagaatcattgcgatagtccaatacaaaagtggtatcctgagttgcggcttcgccgaggtccagccggcgggtaaacaacgcattccccttccagtagaaggccatagcttggctaccagaagacacaaacggctcctcacaatcatcgaacacactataaaagcccactccgaatgcaccgatcttagtttcatctgggtttccgtctgcgatccgcttcaatcttgcccaatccttttcgctgaatggagcgccattatttgagatcagaagacgtcgaagagtgtggttggtgatagtatgttttagatgtgcggtgggatcatttgatgaaggtgatggtactgtggtcgatggaagggtctcaaacttgatcgttaccttcgttgcagaggcatcggcagcattttgaatcatttctcggaggaccgtcctgttcaatcagtaggttaatatttggatctcaagatagagaacatctgaatctcaccatttgccggagtatcgagccagcactttcgaaatcaatcctcttgtatcgactgtcacagcttcctcatcggcaccagaccccatagtccgcgccttcaacgcgttgaaatccacattcatagccatcttggtatgttttcttctatctgggtatattggggccttatatcttaatcagattagacatggaagttcatctacacctctgtatgaacaccgatgagtaacaagattgaggttgtctaggctgccgtgaatatggtgaacttggggccactgttcggataaagcgcgaccgaagccggggaaacaaaagttgacagaacgctgagcagaggttaaattccagtaaagacaaagaaaagataaaacaaataagattatttggtgagaggagggcagatcgttggagactgcggagtttacgtcgggtttatccttatcggtagaattgccactactctccgccctagtcccgagttatcatctccgtgtgtacacattcataggagaccccggacccgcttttcgtccagtctctcgcaatttcccctattacatgatatccgaaagctgcctagataattgtgtggatgtgggcttaatataattaactgctctcaactgacaggatgggtgttgaccctctgtccccaattgcgcctgtgcgcctcagggcgctcctcctccccatcggcaagatcaagcgctcgcgctttttgagtttcgctgcccgactacaggctgaaaatgtagttcgactaggggatattagtcccgatgcgcggccgaacagaagtatgccctacgcatgatcgcgaggagttggacattgctaccatatatactaacctgctcttgtcctagacatgttttcaccgctggcgtttcctaccggattgattctttatgacctttctttctctgtcccgccgacctcgcatctcgaactatttccctttgaactttacagagagccattggttattattgcgatcgcagatgggtccgaactgcccgagagcactggcgacgagcagaagcaccccactccggagggactagatcggttgttggaagagctcgatggggtgaaggagaggaacccacgggctttgttaaatcaactcgtggtttttgatcaccctggcttggacaagattacgaatggaccggataatgtcctttgggttcctccgccccagacctccaaggccacgacaatgaagacagttctatgcgatattacgtctgttctactctccgaaatggatgaatttgcaaaaaccattcaaagcataccgtcaatcgactcgcccaaagcatcgtcatggggcccgcaccggaacccagaactacggccacggccggtagaccgactattgaatcgtatgactctgcccacccagatatcatcgaatccgcacggcacacaagatggtactccgttgagatctaatgctagctccccagctcctagcgatcatgaaactcctacaacatttgatgagatcactcgggcaattcacctatccagtcgtacaaactcgggaagcagagcaccttcgacagcatccccgaaggagcacagccgtgaccgaatgtctgtcagtggtatgagtgctaccgacagaactaagaatcggatcaagggccgtgccggggtgattattggaactcttttcctgcaggcgggaaggtggcccgatgccctcaaggaactgactgaagcggcgaataacgctcgagcaagcagcgactacatctggcacgctaaagcgctcgagactatccttctttgcctgctgatgttcgggtgggcaggcatggactttcaggtatgtggatcactagcaatgccatcaaataccctgggtactcgtgtcagatcgctgatttgtttactagattccatcagttctgtaccctgttgcagacaaatcttccaaaccttcccgcgactcaacgacccctagtagcgctggaaatagggttatctccctacacaacctagccaatctcttgccagatctttcaaacaccatcttaaatctttatacccgcgcggccaatatcacagatgaacctcttccacagctggtgttctcggagacggtgattcgattagcgcgactgatggtgtcagcccgcgttcgcgatggagctttggatgacaatgctttgaagcacattgtaatgaatgaacacttggttccactactccagctagagcttcctcggggaactgtcttgctccgaaagtctgaaattgctaacttcttataccgggctttgccgcttgcccttggtgcagacctacctgcgactgacgctgttcccataattgttggtgttgttgctgttcttaattttcttgacctgcctagaaagaaagcattcattttgcgtgagcttctttcagtaatggtaccaagtttagtgcaagcacgaaaaattggtgcagcggaggtaggcattcatcccgccgccgggttggcgtctctgagcgacaccgcatttgatgtcaattccttagacgcaggccccggcaatatggagtcaagtgtgcgtctccttcttgcgacaattggagaaatctacggtgttcaaccttcatcgttctacgaatgggagaagagacaaagccaattatccagtgcgagtggtcttcaggaaagcaatgaatatgattcggttgctagtattgccgagcgggcattccgacatgtagttcttgatcgttacggtgatctgaacttgaagattgatgtcctaaaagcgtgcatcaactgctgcgaagcccttccggatttcactggagtcctgcgttttacagtcgagcttttgcagaccattcgaggagatatgatgctgggtgcagcatacagatccccgccgtatctaccgcaagacgaacaagtccgccttctgaataacattaagcgcaccgtgggcgcaggcaccagattaggtgtttctgatatggtagcagagtattgggatgacttcctggtgcgtgatgtcaagttattgtcactgccagatcccaaaagacctgttcggcggtccaaaacggagctggatgcggttaccacgagttcggacaaggcgaaaaaggatccgttcctgtacaaccccttcgccaagcctaccagcaaggcattggaaatgctcactgtcgctgatgaacctgcgccgttccaagtaactttgcaaaacccctatgaatttgaaatcgagattgaacatctgcgcttagagagcagtggtgtgccatttgatgcagtggcagaaaatttcgtcatcgcgcccctctctgtgcaagatatcactgttcttggcgtcgcccatggggaaggcagccttcagatcacgggatgtatcgtgaaagtgcgatactgtcgaacgcggagattccccatcttcaagacattctggaagcctgaacctgaggtcaagtttaagcgaacaggcctgggtgcgaagaagcctcttacagagcgcccggtttcctggagctcaacgacctccaaggatggcaagattgatgtcaaaaaaggtccggaaacatcaacatgtgaagtcaaggtcatcgccagacaaccgtcacttgtcatcgaatctatgtctctatcgcaatcggcgatgatggtccttgaaggtgaagtcaaaaccttcactattacacttcaaaatgcctcttcttgccctgtggattttgtcctgttcaccttccaggattcaactactagacagctacagactgcactgagtaatagagatctattgccggtcgagatctacgagctggaactcaaattagcaaccaagcccgctttacgatggcgtcggctgggccaggaccccagtgattgttcgattgcagcaggccagaaggcaacctttaccgtagacgttcttggaaaacctggtttgcaggagacaacagtccagatcgactactcctacgttggaacaggcccgggtgaattgcctgatatattctatacccggcaactgtttgtgccgttgacagtcacggtcaatgcgagtgtggaggttgcccgctgtgacattcttccatttagcggtgacttcgcctggaagaaccatattgaaccctccgtcgactgtatacaaaagtcggatgcgttgctctcgaccactgacaatgagcccttcgcgcaagtcctcggacgccttggaaaaggggcttacggacctgatcactgtattgtattgcttgacttgcgcaacgcctggccgagtcctctctcggtgtggttgcgcgtaagtgaacaaacaatggctgctctccaaccggaggcgacgaccacggatgatcctgagggcaagtactctgtcgacggagacctccaacctggacaggtttgtcgttttgttctggttttgcctcgcgtctacttagacaacccacatgcctccatccccgtcgtgaacaccggcacacggagacaattcgtcgtcagcgccaacaaattatcatttgaagctgaggcggcctcgcgcgaagccttctggttccgggaagagctcctcaagagagttcttggaggctggaaggaacctgccacaggccgcgaaggatccattgacctccgaaacgtccgactgaacaaccgtatggtcgaagccatgcgactcgaagatgtcgaaatgagattctctctgacctcgccatcatcttcacccgacacttccgccgcagtggaacaaacgggccgctcacgcttccacgtcaagacagacgacctcctcaccttaaatgtcaccgtccacaaccgctcctcccgccctattcaccccatcctccgtctccaacccagccttcgccaccagccaaacaacatcgccctcgatctaacccgtcgtctcgtgtggaccggaatgctgcagcaagcactccccgtcctaccatgtggagagtctaccaacgcctccatcggtgtcacggtcctctgccgcggcgaatatgagttcggcgcaagcgtcgaggaagcccgactcatacgtccatctttcgacgatgatggtgatatccctgctgaccgctacaacgacgatggtatcatggatacctttggtgcagatgtcgtgcggcgacgacggatttggcatgcaaaggagttgtgtattctcaatgcgagcgactgatgatctcggtgtttgactgttctggtctggtctcgtgtcatttgaacgtgagcatagacataatttcatcttgtctaactcctgtctttttcttcttttaacttaattcgatgatgaccatgtagcatacatacccttaacacccttctgtgcaaacttctgtctagatacctcaggcgttgtctgtttcccactgcaaatatatttgaaatctgtgagagcatgatatgctgttaaaaggatgtatgttcacagaatacgcctcaatctgatatgttcctacgaaaatacagggatttactaaaagataactacgatggtcatggatgttaggtgtcactgcggggttatctcgggcttttccccgcatttcctttaaatagatcgccgtgtccttcacttggatattcactttcaaattctccctcaatcatggcccaaactcacctccttactttaaactataaaggcgatcacaaaaagcctgataccatctatgacacccaaaacttcctcgataatgaattggttggctctaaaacaaccacatggatcgaggtccacgaccccgcaacaaacaatgtagtctcacgagtcccggaaacaacccttagcgagtgcaaagccgcagtgatctcagctcaaaatgcattccccgcctggcgagacactagtatcatgaaacgacaagaaatgatcttcaagttgaccaacctggtccgagagaacatggattccctagcaatatccatcgtcacagaacaaggcaagacctttgccgacgcaaaaggtgatgttctccgcggattacaagtctgtgaaaccgcctgcggaatcaccacacagcttcccggcgaggtcctcgaggtagccaaggatatggaaacccgttcctaccgtctccctcttggggttgtcgcatccatctgtccattcaacttccccgccatgatccctctttggagtctcccgattgccattgtgactggtaactgcctgattctgaagccaaccgaacgcgcaccaggtgcttccatgatcatcgctgagctctgcaagaaagcgggtttcccaccgggtgttgtaaatattatccacggatcgaaaccagcggttgactttatcttggacgccccggagatcaaggctatctccttcgtcgggtcgaacaaggttggcgaatatatttacgaccgtggcaccgcgaatgggaaacgcgtccaggcaaatctaggcgctaaaaatcacgcagctcttctgccggatagtaataagaagcatgctttgaacgccatcgctggagctgcatttggggcggctggtcagcgttgcatggcgctaagcgtcttgattacagttggtaaagctcgcgaatggctgcccgaattggttgagaacgccaaggggtaccaggctggaagtgggtttaacgcccgatctgatctgggtcctttgattacgccccagagccgggatcgctgtgtagacctcatctcgagtgcggagaaggaaggtgccactatcgcgttggacggtcgggaatacaaacccgagggttttcctaatggaaactgggtatggaaatcctgagtcccagtgtttacttcaactcctataaactatcctgctaacacgtcaacttgataggtcggtccgactattatcaccggggtgaaacccgaaatgagatgctatcgagaggagatcttcggccctgtcttgctttgcatcgaagctgacacaatcaacagcgcaattggcctcattaatagcaacgaatggggcaacggtgcagtcatcttcacccagtccggatctagcgcgacgcacttccagaagcgcgtcgagtccgggcaggttggaattaacgttccaatccccgtccctctccccatgttctccttcaccggtaacaagcgaagcgtggctggaacgggactgctcaacttctatggcaaggacggtctccgattctatacacagtggaagactgtcacgtcgctgtggagaactgaagatgcaactgagcttgagaagccaacctcaatgacttgatttggtcgtgacggataagctgcatacggtggattgggagatttttgataggcacagacatgtcgagcattttcttcctggaaatcattgcattaggtgcattcgtagtattaacaataatagtcggcgggttatacagcctctatccttaacgtaggattccaataacttttcaagcgacatatatgtaagatgaccatccgatgtcttttttagataacgagtcgacatcgacaagatactgactctgacttgagttgcaatttacgctggcatctatatctttttgttgttcaatgactgatcattctgttctgtaaccaaagacagaactctcccaattgcataatatattcccgtcaaggtggattaaaaggttggtctttgagaatgacccactcccccacagtgggcacgccggtatccactctcacgggccgatattcttccgatctcttgatagacccacgagtttagataacttagtgttaacacatcaggtgtcacttgataatttaatgccagaagtatcgactactaagcaatgaatcgagattataaaggggctatgttttgacataaatgagtttggatctcctatttgcaatttgggttggcatactggatccaagggaattagatgctaccaacaaagtagtaacaatgttacaatacactcaccgatctgttgagataacaggataaaatgcatagcaaattagacagaatcttgcacaagtaactttgctgcttggcaaaacagtctggactatgtgctggctcctattgaagaacagagtcagggttctttaagctcttggcaataaaagtcagcaaaggaatgcgcctagaagaccagggtaatactcaaggtacaaaagagcgttggaaggaaatttacacccttcactcagagtgcttgaagtacgagtcaatcttggcgggttcaattgagaaaacagttctggttccatctagagttgcaggcatgaatgtcgcgttttgcacaccctagagacaaatcgaggctgttggacatgcactcaatgatacccaattcccgcagctgtcgctcatcttgagagaagatggcataacttggcgttcgcttagatgccgataggttccgggcattcatatccgtggacaatgttcccatcgagaaaaatcacaaattgctttcatagcacaagataagttatgatacactatcacttctgactttttttgggggtaggacgcggagccacatgaaatctctattagaaggtgctatatgcggaaaaataaccaagggacaagaaatcacaaaattcctcgttcgaagtacgaggaccaaacttgaaatgagttgaatagcatgattttatcgccgagttgaaccagctaaataagtatcattgaaactggcatcttctatacagttatgcttctcaacgggctgcaggatgcgctaagaccgccacctgcatgtctatattctaccaaagaccttgtttccgtccatggagcactgtttcgctgctctcttcaacagcccggccgggctagctcaatcggtagagcgtaagactcttaatcttaaggctgcgggttcgacccccgcgttcggctattcctaaaaaccaaacctgagatttcttttttgctcttttcttttttttttcgcatgggaattggatgagtttttcaaggtccacttaggcctgccggctccggcggaaccttggctagcgtcttggcgtttgtattacctaagcagaaaccaaggtgacctccttgcacacttggcaatgctcttcgcagtaacaactggcaggcttcgaaactcatatatagcaagcagtttattctgttcgagtccaagcaaagacttcagctgctcacaagtatcagatctctatctgttggaaaagtttgatgcagaagaatggctcaccgttcaacaagacgtatatagctcattcgaagctctgcagtgggaagttaagtgaaaagcactggatcacgttaccgccgcactgacctctcaactggtcagctcatcggatacgagtttttctgaaacacaccgtactttaacatctacatatacccttgctgcatcatcactgtgatgtgttggccatatgtgagatctttaggcgcgtggcctaagggttgtttgttgaaatatagcctccgttcattctcatcctctacccgcatcctcgctctactgaaacctgaaaatctcgttcccatgaacgattcccaattttctattaggccgaagcctcagaatcccaccgcacaaaggttgggagaagttctttcagtatggcttcctaacaaacccgagggcctttacgatcaatatttgcaaagtctttctcctacttatgatcatttgttgacatatttacgatacgaccggatctggcgtttttctgaacatacccctcacagcctgtcctatcattctgagagtgctcttttgtcctctccggtgtttgtagtgaatatcggcgacggcgatcgagttatagatcatggtgactatgatgggacagaccctgaatccatgcgagacctagaattacacctttccaacacggatcctgattcaaaggatcaccctcgctgtcgaatcatctgcgcacaacatatcacgtgtttgggcatggaggcattgggtagtggactttctttggaccctaatgtcttcagtcaccatatcgggacatcattcaaggacattgaaaagagtacaggtatcaataagctctgcaacacaaatattggccatattccttcatctgtcggtacctacgagcacgagagaaaccttcaaatcgtcaaaaggcacctagggcgactttccattgccaatgtggagcatgcaaaagatctaactacccgggattcgattgtcaagtccatctaccttcatcaggaccatcccatcacattttctgtggatgtgccacgaacgatctatgtgcaaggatatcaatctgaggacgacagaacacaggctattggaagattcctacgtataagagtgttggcactacaggaccgagtgctgaatcgtcgcattgctcggcagcgatttgttgacgatagcatgttctgcgaccaaggtgaacgatattcacaaaacggccttgacatcctacagcacattaccatccatgtcataaacgacgcgaaatttcaacaaggtatggatgactctgtgtttacacatcaatgagatcgcacaattgaccaatttaccaattaactaattttgttagtcttggttttgtttccaccttgtccagaatttgatggagataattcagacaacgatccttatgtttttcttgaccatctgagaaagcaagaacataccaaatcattcaaggaattctgtctcaatcgggataaaaaggactatgaatccgcaggggcatcggaatctcgacagactatgtctcaagacgttgaaatattctccaatgatattcttgagaatcaagctggtacccccaaaggactaacggacgtggtccaccttatacgatcttacgctctgaatgcatggtttgatcgtctgcagacattgaaagaccagcttgaagatctcagtcttcaaagcctatcccatcgaagcatacaacatgacgaagatccacaggattcagaggaggaaaaccctacatgtgatggtctgattgatgaagaagggatgaaaggtgctattcttcgctacatcgcgtcactcgatgatgaatgccagcggttgaaaattgatttgcatgcggcgaaaataggattttccacaaccgggtccgactctgttcgaacattagaacagacaatggagaagtatactcacatacgatcccaaatgagcaaccttctctctgaaacccagcatttactcgacatgaagaacagcaggatacaacaggctttaacaactctcgaaatcaaagaaagcagaacgttcatcgaacaggcaaaaacagtgaagaggtatgatgttggccaatcttgagagaattaggactgacatatgctaggcttatcataatatccttcctttttataccgttgtcccacgtctgcttggcattaagcatgaaattttggtaaatggattgcccaaaggcattgctatgacattccccggcgtttactttgcgggctaaaggcaatgagatcatcataatgactccaaaatgtgttgagacgagacgccgggatccctgtttatcaggctagctagcctttatttgtttgtaggggatattctcctctttcctctcccctcttgtcaaaatggcatgaatgaatgcacgtacgtctgcgttatgggtctatgatgtaagggatataccccgtagtgtggggcctatggggcttcaaggttaaggctcggcaggacgggatcatcctttagttcaggtggggtcacgtgcttgtctttttctcatgtatgaagcccctgatttaatgcaagccttggcttatttatttcacgtcagtctcttcgtctatcctacgctttcctcttgaattctctccaccacagatcaacatgagtggctatccagttttgcagatgcctgctggggcaagattcatcgccgtgggggtcgcaggggccacaatcccacgggatgttctgaatcaaccttcaagaccatgcaacatatatcatacatcggatctatgtatcacccgcgaaaagcttatctaccagactctgccgagagagttaaaaaacagattttgaatggggtgtagtcagaattcattttctcccacatagagtcaaaaatggtctttcaactcctggaaactacgcataaattaattggataattcaatacttggctaaaattaaaaccgactatggtagtttaagctatctatttagatcgggaatctagatgtcctcgaacttcggcctaagctgagctatatatacattcagttcgtcatttacgcaaatatactgctgtcgctacatgactgtgcaaaggagtccgccggcgagggctaaagaatgttagtatcccaattttctggagtatgagatgagatggcttacctccagatatgatcccagacgccagacctgaggcaataccattggcggcgccattgaacaagttcccctttttttcactcagcttttgataggtattgcgggcctcactaacctcccctcgaacagcatcgacctcttgctcgtatccttctagttcaagtgctaccttccgggaattcttagcacgtcgagcggtgtccttgcggatttctgcaagtgactcctccatgtcgcgtagctcttgttccttagctgctagctcctcgaaaaatctttcttcgagtaccttgagtttctttttccaagctctttcttcatccttatgtaaatcccgcatcgacttctccagctttcgtttattatgctcagctttcctcatctgattttccaaatccaccttaagctcctgcatctcgatggcatgggccgtattcttctgggcaatttcggtctcgattgcctgtttgagctttttcaactcgagcttatgagcctggcgagctttgtacagatccccagcgatcacaatacctgctttcgtctcgccgatcactttcccctggtcaataatttcgcgctgcagttccaatacctccggaagatgtttttcagattgaagtataagatgtgtcacgatgcggcgtgcagaagtaatttcttctaacgagcccaggcgacccttctcattgtggcgaaacgttgtcgccccacgagaaataaatctaccaaagaaccgttcttccgacaggagctgtgcttcacgctgctcacaaagcggagatttttcggaccacatagttgtcgcgatggctagagtggaataagacgcgaatccacacatagccttcatcatgtcaagattgcgcatgctagaccctgacatgcggttgtcggatataggatgaagcattagtatgccgtgaatgcgcacgccgtttgcatacgatgcgccgaggtaagttgcgaggacgcttagtgtgtcaatgtctgaacggttcgtgtcgttgaatccgggggtatcaatgaggtagactttgtggccattgcagtcgaagttgaacacatcaatggaggtggtgcctggtggtagtattagccagtcatactgagtagaagccttggtgtgagtcatggaaagtagaaacgctcttacatgagtacagcccgtggccaacagtgacatcttcgcccgtgcatcgaccgatgaaagtgctttttcctgagcccgtcatacccatgacgaggaagaacctgtcgttggggctgggcttagtgacaccggtaaaggctgcgaagcgttcagtctgactaaccacagagcgcatgtccatgatggtttgaattttgcgattattgaccagccaaagtgatggttaacaggctgcggccaaaagagcgaaatgaagacaaggctatcggttgagcacaggaataattactggtctaacttcaaaatgcgtgttgagagcgataattctggagcattagcaggcactttttacgtgtcataaaaaccccccacttgactttacaagacgccaaatatgggggtcaattcaaaaaagcaaatatgcgaggcattttggccccaatatgcgctttgactggactcaaaaatgagcttgtaataagccgagaggcgtagcaaatggtgtacccagtggaaaatgaagtgattctacctgcacacctgggcatgggagtcagcccccgggatgaggctgacaaggtgagccacgcagcaggtgccgtgtttcggtgccttatacctgaaaggaatgcacttgcatcggcgagacacacatgcagcttagaatccaacgttggaggaatttgggctgacttgattggggcaaaggtttcttggcgacgacgcggtctcctgtggcctttgcccgggtgaacatggctgcataacgaagctgaggcggtaagatattatccaatgagagagttatgttctgctggcacacttagttgcccgtatagacattgaattgtgacggaagccatacagcgcattttaccatgagaacataacaaaaacaaaggttcctattctgaggtcttgggtgccgtattcctatttcgaggcttgatcctgttggtgcttttgggcatcaaacaccgacgggcttccactatttatatccgtcctagcccccttcattattatcccacaatattaactaaaagcctatcagattgcctctcatgtcagtcagatccagctttactagtatgtcttatacttcgcataactaggaaatggtactaaggctcacaaacacacaggacaatcaggaaatcgctcagtgcatggaaatgaatcacctctaagcactcgaagctttcgcggaggtcacgagcccaggtaagtggctgactatagtccaatgtgttgtggccaccatttaatgattaactagaccgaccgatgtattcattgctgtgatgggggtcactggctcggggaaaagttcattcatttcgctttgctcgggcaagtccgtccaaattggccatacacttgacgcatgtaggtgaatcgctatacgaactgagctatttccttggtccaagtctgacagaggaacaggtacctctaaagtcgacgtatacgcgtacagggaatcatcagatcgaactgtttatttgatcgacacgcccggctttgacgatacatccaagaatgacaccgagattctaagtgagattgcgatatggcttggcgactcatatagaagcaaaattctgctccacggaatcatatacctgcatcgtatcactgacgtacggatgcaaggctccgcgagacggaatatccagaccttcagaaacttgtgcggtgaggatgctctgaggaaagtaatcctcgtcacaaccatatgggataaggtccaaagcagcgagggcgacatgcgggaaaagcagttgaaagacacaaaggatttctggggttggatgctgagcaaaggcagcacctgtcatcgacatgataataccaagactacggcgagaagtatcgtacagcggctgacaaaacacaagagccccataatcacagatatacaaaaacaactagtcgatcagaatctccaacttgatcagacagctgccggaaaagggatacagagcgagactcttaaagagagagcaaaatggatgaaggaacaaaaaaagttcgaagaagagatccgagaggcaatgcgccaaaaggaccgcgagaaagaagagataatgcgcgaggagcgtgatatgagtgcggcaatgatcaggaaggctaaccaggacatggaagccatgcgcttcaacatggaagaacttatcgcccagcgagaggagcgcgaggcactcttggaagagcgcttagaaaagcggatggagaggcagatgcgaaagaagcaggctgctcatgacaaagagatcaaacggattcaaagagaaaaagaggccgagatgagaatatcaagagaacaggagaagcaagcccaacgtgatcgaaaaaaggtggaagagaaaaacaaggcgcagcagcagagaaaggcggaacaggagagaaaggcaaaggtcgctgaagccaatcgccagtcgcaaaactcttcatcgaaagttcaaggctggtctcctttttcggtaaccatgggagattacagttgcgctctcagtggaccaagatgttaccaggcgtacgttgacagtgcaagggagccaactgcagatacttactaatcgtctctaccaacagctctaggggtggctggccgaaattacaggttggctcggaatggattggtgccgtcagctatgggacttccggcacatggattgctcgttacggaggaggaacttggcgtaagcaattcctcaaatctgcgacaatttacctagctaagagatgtctcagagtactcacttgagcattacccaactctcgcaggcaaacttgcccatcacggagacagtaatcttgaattttgtgtcctcgggcctgggcaaatgtactatgcccagtgggcgaatgggttctggtgcagcgaagcaacagaacagatcaacaactatttaacggagatttacaatcgatcggatgattctaaagtgcttgccatggcatttggatacaatggcgcctatgtgatttcatttggatgggccactagatcgactatcaggggaaagtccggccatcaaagggatttgaaaggatattactcggatctagaacaattcgccgacgcaaatacttctttggatatagtggtgagtctctcgaattgccttgatcagatctcggaaatctcactttccaacaggccatcgcacttgacccggatagcacaacagattatatattagtctacaaatccggaaactatcggatacgctgggtttgctcggatccccggaggtcacaaatcattaggagttggtgggaccaagaatgcaagcctaaagaggctgtagcgcctacacagtcaacacataaggcttcagtgtcgagatctttcaaagaaatgctctcgaagatcgagaagtacctaattgatgggaataatggatgagaaaccgggaatatatatctatcatcagcttttgtggcagttcgaatattcggatttctttcgtgctattaccttctctgaggagacacgaatcaaagcaactcctgatgaattataaaagggaaagagacgggtagaatgtaatccggtccttagcaccagatttcaaagcagatgtaaccacagagccaccctgggctccggtggcaccgacaacagtaaggattttggacattttggatcaaagtagaaaagatgagtgtattgagatctaagagataaacagtagaagcaatgacatggaagatcgaatacggtccctctatatatattttgactactacacataagatcgcctatacatggacgaagtataccacggtacagtgatctgcatacacgctaaccccatggggtcgggactcagggctacaataaccccgaaacgccggattccgcatcttcaccaacctttctctcttatttttttctcagcaactcgtcatgtacaacataccctcatctgtctgcgttttctccgcataaacaagcattattaatgaactggcccaccgcacccggagctcgggttgtcgatcgatattgcttcagtgttccacttcacattgtgcttcaatttgccgtctcatcactcaataaatagtccccttatggggcttttagatagttgccttctgaatgttatggcggtccaaagatagacaggtgataccattggcagactagcaatgtacgtggcggtgaagtgtgtaaaacaatcgtcgtttgtcgccactttccacatggtctcgggagtcaaacgttggactcctgctaaaatcgaaccatcgtgtatgagtcttctatgggcgacggatcaaaccactacaacgtttatctagtatacgtccatcaattaaccttgagcctttcaaagagtagattacctctccctttaatggtagcaccatattagagatagagacgagagtacgtgaagaatgcgtgtagtaattattgggaacatacggagaggtcacgcgacctggaataatctactcggcataaaatattagtcttggcatccataaagcttaattattaatactgtattattcctccgtcttaccgccctaccttctcagcacggtagtctttttgaattctaccagtcctaccgatttgaacttctttcagataaaagagcagtaaattgcttcaaaaacatacctcgtattcattacgctcgcaaaaagccttgtgatcgaattcattatagagttcatctggctcaggaataggctcagccctcagaagctcttcaagctatgattgcggcatttccgattgataatgcgccatggtagctagtaaaaagattggaacgatagtttgtaatgtgtatatacacagatactatatatattagatgtagagttgtttatcagtaataaagtataagaatgtacccctcgtaaacatacatgctccataccaaaacgggatcaaagataccgtacgatttccaaagcaaacagtgtttacataagcccaaactaggggcactagcgtaagcattgaccatggtaccaggtacctacgtcccctgaccttatctgccgaactatgatcaaccgtcagccagccctccgggaaactaccccggacaaacccccttgtgaaggcagaatttggctctctctgcccaaatgacacgcgtaaccactattataggcgacggatcggaccactatatcagctcgccacacgcttttccgcagctgtaataaatatagcaacttacatttgatctaattactcacttttctacggtcgcattgagttcaaattatgaagatatgattgattgattgaattttcaaaatacaaatttcaaactcaataatggagcaagcatagagcaagcaggggaaaactttgaaaagcggtcttcttagaccgccttcccatcaaatatactgccgattccggtaaatcggtaggacgggcagaattctaaagccggtgaattcgggtatagggcggtaagacggaggaataactatggaaccttggaaccttccaaggttggaatatagaattgataactaagcggttttatgaacgccaagactaatatcttaatgaattgatggacgcatactccggactggtaaatgtgaatagagaagaagaggttgtaatattacatagcctgcccaagaccataattatacaggcggtgattaaagcggtgagccaaaaattggttttgttgttgtggttcgatccaccgatccatcgccctggtggatatgccaagacacgctaaacaacaatgtcagctagccttgcctctcagctgaaatgagtatgtatgtataactatgtctacttacccctgggcgcctttgatttctataaattgagtctcggcttccattacactggtggttgtcctctcaactacattgtgctgaaaaattgtatagcaccattcagcaaccatgaacttggccgtcctgatgtcccttgcgggattgggcgctagccttacagttgggctagaagcaaaaagcccatttattgccggtcggctctcacaaacgaagcaatttgagctgaatctgacctgggaatcatttgcgcccgatggggttgcgcgggagcaatttttgatcaatggccagttccccggccctccactgatcatggatgaaggagacgacgtcgaggtgaccgtgaataacttcagtcccttcaataccacaattcactatcacggcatcgagtgagtttttggaaactaaaaagatacccgcatgtccactaacatgttaatagacaggaaggaacgccgtggtcagatggtgtgcctggagtttcacagaggcagattttgcctggtcaacggtttatttccaaattcactgtccagcagtatggtgcatattggttagtcaataatcttcaataagaaatccaagccctctaacgaattgaaggtaccactcacatacttctgggcaaatcatggatggcctgtatggaccaatttacatcaggtttgtttgcatgatatcgagcgcgtcaatgccaatgactaatgtctaaatttatagacctcggaccattcctgcgaacttggccagtgcgataacaaatgatacatttgaacaggctcaaatacataacgccatccgggccccgtctctagttatgctctctgattggttccatatgacctcagaagaactccaagaggttgcaatgtctgcaaatattgatcccttgtgagtgattcaatgagagaagctacaagcaatgaaactgacatggcgatcaggtgtacggattctattctgatcaacgggaaagggcgggtcaattgccgcagtcccaaggaattgactgacatggtgcccgattcggtgaaatctgtgctacagggcatggagtatacggtgaaagggtatgttctgaattagaattcaatacttggagacgccagcgctaaatgggaaataaagttgccttccactcacaaacacctatgcccaaacgacatctggacataacttgagtgcagttccagcatccatgttttacgagtgccacgccactgaagcggcagaagaggtcatcgaagttgacccgttcaacggctgggcaagtctcaattttatcggctcagcgtctgtctcaactccaattggtgtgtactttgccagtctttataagctcccaggctaactagcaaagtgtctatcaataatcattccctttgggtttatgaggttgatggtttatacatcaagcctgttaaagttgatgtatgaacttttacctttttggaattacctttcacggaatacttctgactcaaacttctctaggcgttaacaatcaacaatggtggtcggtattcctgcttggtacaactgaacaaagcgccaggaaagtacccgatgacagtggcaaatgcagggttcaaccaaaagatcgcgggctttggtactctgtcctatacgcatacgcatggacgttcggttgtatcaacgccttcaatcaactacggtggaatcgccacaagcacggatgttgttacactagatgagaccgtgatcgaaatgtttactcctagccagcctagtgagcattcggataaaacctacatcctgactgctggccgcattgagaaggcttgggaatggtcccttaacgggaatcactcctacggccttactttggaggccgaaaagcccgttctatgggaccctcaatctgcggccaaaagccctttggccatcgccacaaagaacaatacttgggtggatataatcttcattttatctggcaacacatctacacttcagcctggtcacccacttcacaagcactccaaccgagcttatattctagtgagtgcttccaaatattgtactggctcttgctccaattcgctgacatttgacttcaagggttccggcaccggcgacttcaattacacttcagtcgccgacgctgtcaaggctattccagacagtttcaacctgatcaatccccccatgagaggttcgcagctctaattccacagggcctctgtacctgactgacatcattagacacttttactacgctgcctgcttatcaaggtaaaagctggatggcaattcgctatcatggtatgtgatttccccgactggatagaagatcattggctaactagcacggttgaattagttcaaaacccaggggtatggaaatctgaattctgtcgatacccggtcacgtcgctaacaattttaggcattcttgcttcactgtcacctcgacccacatctgacagggggtatggggtaagtttgcaatatgtgtacagctatggctatatttcgatgcaatgtgctaatttctttccttaggctcgcgattctagacggtatagatgcatggccgaccattccgtcccaatatggcccaaatgggaagtggggaagtattgacgcttgacaacttttatccgatttgtacaagagaaattttctctatttatctgttttaattggtctttttatttttcttattcgaatatatggtgtgctgtgtttcaatgtactttttccagatgttcgaagtggaagaggtgagtacatacattctactggagcatacctcccagccagatcctgcttaattggcttttacttattctgaaactattgtactaaaccatacactgcattataatagcattttattcaaggaaaccctataagtggtccagtatgtgttggaaaataattccagtacaatagtttattgtgcaccaatcagctttcctaatggtataaccgggccatttccttcaaactcctcatattatccgccccaaggccttaacttcatcatccaaatgcgtccataaaatatgcgcaaaactacccatcaacatcttcatatgacccagtcgtagctctgtctcgcccgtgcgacatgtattcacatagtcctcgaatttctccaatcccaggtgaatcatgcggtgctgcccgaccaagctcaattcctcgcgaaactcaggcattctcgaggctagctcagggaaaaagtgccgctcctcgatagtgtgatgcagcgtgagttgacgacagaaggataaagcgaggttgaggaatgcaggaatcgattggccattggggcgtttgttcttgacacaagcattgtatgtatcattccaaataatgcggaagttattatgctagaaaacatttagtaggctgtgggaaccgttgtggtagacggatagatgacaggaacctacaaatagatccatatggtctgccaatcgattctaggccttgaattccgacggagttaacttggagagctggattccagcagttgcttctttaactttcgccatgttatattcgatcgaagagcccgtgaacaaatgacgctgttgacagtgtattaaagatggcccaaccccttgaagcgcactctcttaaaatagtatgtagagtctgcgccatttattatcgaaaagtgtggattgatagaaataattgtcgaatcatgccgtaattattatgaatctgcatcacgaaggcaccaattgaccttactatattcgttcggagctcgaagctcgggtaggtgaggtctggaaggtcgctgactaaggtctccagagtccacccgtcccattctaacattcgatcagctgtaagcccggggtagggggatcgttcttcatggactcggagggtccactgatccgcagaatgacctttgttcacttctgcaacacgtgtctctgctccctgccgacagacgatggcgagattactatgatacacttgacaaatacatgagaacagcctggatcatcatcgagctctagtgctgctggattcactactgttccacagtccactgaggtctctggctgcagacctggatgcagaacgagctagtccgtacgagctctagtgaggagacgaaagtgcggactttgaaagacgggtactggttcttgaaccgtgggagcccttgcactgtggtggcaaaccgcacttcctgtccaaagagctggcagaagctgtctctagttcttaagatcatccctgttttcctgtcttgcctccttccatcatggacatatcttccatggtccagctagctctcttttctcttttctcttttctcaaccaaccctcaatatctaagccggaaatcaatatatacagaagaaatgcatctcatgcttgggagctatgtattaatacacaagaatccaaaatagccttgtcttggacaatttttgcgaaatgagtagtggagatattattttattcagccacctggccacagaaagagactcgccggtctcggtaccagccgcaagaacaacccgccatccataaaatacaatgctctgaaaacacaggctgtgagagacggtattaaaagcgagtaaagaaaacaggaacctctatgctatgtcgttgaaatatgatgaccaaaaccgaatactcgagaagagacccaatgtgaggatgtcgttatggagaaagagaagggaggatgagttgagggcgatcaaatgtagataagtcgatcgtgttggtgaatggagaggagggatggtttaaagcatagccttgtactcggatggaggagggggaggaagctgtttcggactggttagcaagcacatcttgaatctaggtccgaacgtatcagttcgaggacagggagtttatcatacctcgagctttgtattatcagccatcatacgctggaagccaataccgacaccctcgatcacagcaaggaagacggcacacataatagcggagtttcgggcagccttataaccaccacggatagcgagggagccaccggtgaagaaaccagcgatgatggcgttgtaaggatcttccttcttgcgaattcccttgattgaacaatcgtatatactgaaaagtcctccccaacagccgaagttaccacctaggacgggcgcgcgcgccttgatagccgtgagagcacctatccgacgttcaccgtaggggctgtttcggaaacccttaacaccgtgccatacggcaccaccgatagcacccatacagaaagcaccgccgaagtcgctcagggcaacccagggacagggatcgcgcgagtgatccataatgtgatgtgtgaacgaagcgagttgagagtcgggggtacaaaggcggatcggctgtatagatagtaattatgaaaggcgcgatggtaaaggtcgaaagttggtaacaagcccagtggaagaaagagacttgtgaagggcgtgaaggtagtaaaggtcgacaagcccaatagtgagagatgcgataacaagataagggcgggtcgaggacttttctttcccatgtcgggcacgtgaccatcatattctacccggtcgccaccgaacactacgacgtcggctgtgtttactcttactttcggattatcattcgctcgcatcaggcatccccgggttctctgcccgggaacgagaatataccggctattcatccctgcatgatgtctcgagaccatcagaaaatttcttcatttctatttgaatactctatggctcttttttcattgttctagggccaagggccaatcggagatcatacatcctaccaccttagaaccgggtattctatgatcgaaagaatgagcttctatagcctcacttcttcatctactaacaaaagaatgtctatcttgacctattccactcacaacctttccacgcttcgcgagtatgagcggtcattagcaaaatagtcggtcgatcacataggatttcgttcaaaatagatatatgcatcagcccatcccttgcaacttaaagtgatgtttgtcgatatctgattcataggtgggtgtctgatattgagttctagacttcttacgtctaagtaagacgttaaagtataactaacgaatattagagtcggtaattgatagatatatagaggagattgatcgtagttgcgaaacatcagattatattcatatttcagtcttttccaattttaaataaatagcaaattgagggagcaaacaacgggaaggccagatgcatggtcaaaagttggtatacctcgcccttctcgccgtcataggaggtgtataagcatatcattgtagctacaaattcagcttatgcattcaaaagcataggattgaaagaattatcgagtgtttggtaggattgaagtgtgacacccgtatgaaaagacgattgataaggcaaatgaaaatgccgagcaaggctcggccttttcggacgaggatcgaaaaatttcgcgaatagcccgagcaaatttacttataaataaagctagctgcaaagagatctgcggtagacatctaggtcctgttccttgttacttgtgctcaatcaactctcggaatgtctacttcacaactatcaaatgaccgggctacgcccagtagctccgaagcgcctgatcgcgtcgaacttgaaaagccaaccccaaaattcccagagggcggcctccgagcttggatggtggttttaggtgcattctgtgtgtctttctcgactttcggatacatgaacgctttcgggtaagctctatactccgcaactctatggtatgataacgaagtctaacatatgaacgacacagagtctatcaggattactacacagagcactttctctccaacgagacttcatccactatttcttggattggatctgttcaggtctgctttctcttcgctggtagccttatcggtgggccattgttcgaccggtacggcgctgtggtaaggacttgtcttcctatcagcaacagcatcattgactaactatactctccatattaggtcattcatatacctgcggtcgctatcgtattttcagtgatgatgacatctctgtgcaagaagtattatcaattcatgcttgctcaaggcgtcttgggtgggattgcttccggtatgctatttgcccccgtcatgacatgtgtgagccactatttccatactcgacgtgctgcagcccttggtgtgacagtctctgggtcttccatcgggggagttatatttcctattgccttgagcaagatgctgagaaacgaatccttggggttcggatggtccgtccgaattgtggggttcatcatcttgttcatggtattgatagcgatgataactgtaagagagcgacttcctcctcgtagcggcaaagttctcttgccgagagcttttgctcgcgctccttacaccctcgtcacactcggtatcttcttcatgatgtggggacttttcactccattcttctatcttccgcaatatgcccagtcttatggcatggaatcacagcttgcgtcctaccttttatccatcctcaatgctgcctccgttttcggcagaatattaccgggcatggttgcggataagattggtcgctacaatatcttgatcatcaccggtgtctgctcgggcattctacttctgtgctggatcgcgacaacttcaaatgcgtcaatcattgtctttgcggggctctatggtttcttttcgggcgggattgtgtcgctgatgtctccttgtattgctcaagtcacgccgagtccggaccagattggtactcatctcggcatgtcaatggccattattgcccttgctggtctgaccgggaccccgatatgcggtgcattgctagaaagatacggaggatacacacaggccgcagtttttagtggtgtcgtgatgtttttcggatctgtgcttgtcgccgcggcgaggttttgtctgcaggcaaagcccttggcaattgtgtgatccctcttcagcctcctcgggcagcttttgcttcaatctgtatactacattagatctgcttttttttactaccactgggtgcgaaaaccttgaaactatgatattatactcttcagaacgacatatttgagcaaggctaattatacatggaagaacccaaaatcagtactatcattcatgaaacctaaatcctccggaaactgttcagtcttgtcagtggatgcatcacaattgagatttcagaaaccaagtaaataccattgagttgagaagttcatcgtcaggaatcatagagctcggatcttctggtaagttaagcccacgtagacctccattatcactgcatacaatcaatacgggtttggatggggcttgtcaacggagtacttacgctgaacctagcagagagtgatctggctgaatgacagcccgccgcgtctgcagtattgtgcagattcggatcactctatctgctgcctctttgtcggatgttgcggctgactctggccacagcttggacttgactaatccaattatcatactgagtaagtaatattcgctcaatccgtgaaatgtcaaattgagcctcttttccaaaatctgtagtacatgctcaacagttgccacgagaaatgtggaaacttcgggaaatattgtcatggtagccgacccatttaaagctttcgattgattagttgcaatcgcaggatttagattagacaagcgcaattgtgctttttcttaccgtgaggcccaaagtttatgtatatttcatggcagatattcagtgcagcaagtagtaatccaatcctacaagcttgttcaggtactttctcatcatgtataagcttttggtaatgatcaagaatcttcgaggatgcctccaatctcgcacgtcggcagactgcagatttgaatgagggacgagtttggatcgcgaactggatgtgcagcaagagtgtatactggtacaggtgaatgctcaacaatctcttcacgtacatcgtggtctgctgttgtcgcggattgttctggggatttttccattctggaatatcgtggagtgcttcttctatctcctctccaaggtgcaagacccggtcaaaatcatcttgctcgcgacatccattgactaaggcacatattttcaatctgacaggcaaagagcggtacatatgtgcctggaaagacgtgtccgtgaatgtggcgaggggcataccttccagaggatcttggcccgacttttgtagctcgtcatcgttgatattcagcggtgattttatgttgaaatcttccattccgacgcttaggggcatcccccgttcaacagaggcctggatatcgagctcaacgatcgtcatccacaagcgccgacgcatctctcgatagtatggtgatattctcgctgtcgagggagattcacgatgatatcctgctgccatagcccaccggaccagtgccccggcgtatgtccagaatgaaccctcttggatatagtttgcacgcttcgcaatgagcaagagacaatgggtcgccaaggtgtcccaggattgaggaggctgattagtcgagttgagccatgattctgcagcctcaatccaatcaagtgcatggtcatgaacggtttgctgattcataacgtcaatgcatatttcgggatgaaagcttgaagcggctgctgccactaagaggaattgcaccaaaaaagaagcgggcgtgcaaagtggactggcccagtgacgattgtaatcagctatgaaagtcgatatattgagtactcggtgtatgatctcgaatctgtcgatatatgtctgtaccaatgtgtccgcaatcggttttatgggaatcaattgtctcagagtgtctctgtctccaggcacagtagtatcattggacaacggacgaagccgataatcatcattggccaaagggtaaatttcgtcacgaagggtgttgatcgccgggtttctggtcttgatttgaacgatgtagggtcggagctcggtaaactgtcactattgaggagatgcttcatatcagttagatagggtgtggcgtacctgttggtaaaagttcagaggatagctatacccatagaacttggtaatagcttcttgtccttttaagtgggtcattttctcatgccaatcggaagagggcctgggtctttccggggtctctgcaggtttacgcaaggccgttggcatggggccagtgctcaccggacggtcatcgctcaacatttcatttactgacgaagatgttgctggattgccacggtaggtgcagctggcggcatttcctgttttcgagcagcgactgcaggatggaagctcccttccacatttcagcttccgctgatagcactggatacaggccaatggggggcgtcgctttttggcccctggcttgaccacacgctgtgagctgattggcccacggctcatcgtttggcttgagatcgattctgacattattagtgcttgccatgagaaatcgccgagcgggagcttttatgccgggttatggtgacgtcggtgatttcggcgcggcaatttcgggctcggcaatttcgaccgtttccaccattggctcgcagtacattttgtccaatcagaggcctacaacaatgtaaatagtgcgtattatggatcattgcggtttattttggcatattttgacagatttattgctgctcattcgatgcgtaggcctcgggtataccagagtctaagtaataagggagctggaaactcgtatccggccgaaacatatataagacttgtgtctattcgagaaaaggctcaatcatctattttatcttcgagaactggactcttctgaagctcaccctttgacagcttccgttctctccttattcagaaccaacaactcgcccagagctcggggaatcctgacagggttaatacggtatcttcatacattctgtcgcgatgtcaacctcacgacaaaggagctttacattaccattaaagctctgaatcgatccggtcagatgagtaaccatgaacgcaatgagaagctcttaatctcggactgcttgggcgtggaagcgtatatcatagacatcatatatttacacacctattcataatctgataatttatccaagctaattgatgctcagacacaaaacatgttggagaaagacaacagcaccgactcttgcattcttggccctttctatacggccaatcccccacgctaggagaatggggacagtattatccagaagtacttagggggcgaagtgacattcttccacagtcgaattcttgatgccgataccagtttgcccgtggcaggtacgtctggctcaactcggatttacctttgacatctataatttgctaagtaaaacgccaggggcttctctgaacgtgtggcagtgcgcggtcaacgggttgtatgaccaacaagacccagatcagccgtcggggaacatgcgcggccttttcacatccgatgcaaacggccaatatgcattttactgcatcaagccggttccctatcccgttccctacgacggacccgcaggcgatattctcaaactgatggatcgccacccttaccgagcccacattcacttcctggtcacgagcgactcttacaatcgcttgatcacacaagtatttcccgatgatgacacttatctcgactccgactcggtatatgcagtcaagtcagatttgcttcttcaattcaagccttacacctcagactcaccgcgaagtaaggggggcaaagaagcgaatgtgcaatgggaagtcaattgggattttagaatcaagcagaaaaaggtgtgataggaatgaattatcgtattcctacgaatcagtcgtccgaccttagcggttgggttgtaccttatttgatatagcaaagaaagcacgttcgccgaaatcttgttcaaatctcttatatatccagtaacaaaaaatacattaaagtatcggcccaacaaaaagttgcttttcatctggagtacaggagtctgcaaccgccagtacagcgcgctatttcgagttttgcctgcaggataagcattcatacatctgaataaattcatataactcaattcaattcaaagaccatgtataaaacggtcctctgtacagttaatgctttttgccgcctttatatacatctgagaatagacttaaggccgcataattggccgaatatatgtttagagtattatgaggatgtgaaccctatgaattaagtatcttttatatgtcatataaaggatacttaggcaccatatattttctccctcgaagtagtacggagtacaaacacataccatgagtctagcttaattattgctaatgaatcacttttcctttcttatgcttaaaattaatcaccgaagtttgatccctgagtgcctgaccatcccaagcgttgtaaaaattcaatatgctgcctaagtattctttgtattggcaagtcatacaaaagatacctaattgatctatctgcggtttggtggagcacctgaccgggaccagcctttgatgacgtgacgtacgaaagacggaaagaggggcctgtcatttttttctatcgtctttctttctcaacggtgttagcacaacaagctcctcccgaattgcatgtccgaatgaaaccggaatcccccaaaacaacccttgaattattatgtgaaaatgttaaacaaagttaatattccacgtctaagacgcgaaaggcgtgcgagtgagggacgaggacgaactgcgcgggcctgcgacacatgccgccagcgcaaaatgaaatgtgatggcaaaaagcctgtatgcgcccagtgccatgctcagggtctaacgacatgcgattattctgaggcgaagctcgttagagagcggaagcagctagagttggctcaactgaaaattggagcctacgaggacttgcttcggaatatcgctcaaagagcggacacctctactgcgaaacaaattacaagcacccttgaagtacatttttgtcgcgtgtcattgcgtggtcacccactaatcagatccggtgaatgagtataggcctatacaacagggagcgaacaccggaattgttcttcaaatgtttcattttcgtctatcgattctctggacaatattgatacggtgggtgaagacctcaatcgcagcaaagaaagtagggctacaggatacatggggaaggattctgaaattgcgtggatgcaacggctggagtcgaatactacaagccagagcgacaacccggattctttagaaaaaccattgaaagaatggcctcctgttaatgactccatcgtcccagtgaactatcgtcttgaccatcatcatttgtccgaccccgaagtgaggaatgctttcgtcctaccaccgaaagcgctggcagatcatctactccaaatttatcgcactaacgtcgacatttctttcccaatcatccgatggggattattcatggatcagtatcgccgcctattctcagggagcttgataaatcccgggaggaggtggttggctgtctttaacatggtccttgctattggcaggaacttttgccgagtctccaaacaagatctgcaggtttacgccgatgacgacgtgttctttgctcgagcgaaatccctgaacatttcggagactgttctctttggctacgaagatctgcaacaagtgcaggtcgagacgcttatgacgttatacttcctaactgtttctcgggttaacaggtatgacccccaaaattgtgttagaagggaattctttcccgtgtgttgtatgttatgcatttctaacgaactcatatatcttggaaaatggtaggaatcgccgcgcgctcaggcatcgcattaggactcaatattcgaagaacgaacaacatatttgatgcggaagcaaccgaagcgcggaagcggctatggtggtcgatcttttacctggaacatctgctctctgccatgactggccgagcctcttgccttggagatggttcctgctctgcacctccaccgctaccctttgaacactcggaatatgagttttctgatgtcggtcagtggggtgatggccgattagctcatgccggcgatatgcaatggacgatcttccagagcgacgaacagatcgaagcccaacatacgtccttgaagtctatgcagcccagcgcgtctctctacttcttctatctggtagacctcgcttttatcacgcactccattaccaatcgggagcacagtacgagcatctttcgagatggttggattcagatcgaaagccgcattgagatttacactcaaaagctagatcaatgggtatctggcttacacgcttccttggcttttgaagacaagcatggtaatcaacaccccaggagcagatcatattatcaggtctcgttagcattgcactattacagcgctcgtgttgtcctcaatcggcattgtcttacacgcccagaaaccgctggaaagagcggcatcaatcttccacgatcccagttttacgacaaaacctcttcggcctttcttcgtgcatctttggcgctcatcgctgttctaccagatcaaccagatacggtttgggcctacaatgtcgccccatggtgggggttcctgcattttctaatgcaagccactatagcctgccttatacatttttcggttctctcagtgccagcgagtgtcgagactgaggaaggcgctcccgggtctgtggaaacgcctgaagttgttcttgctgcgacgaaaaaagcgctccactggctgtattgccttgggaaatctgatgaggccgctcgtcgagcttttctgctttgcaacaattgcattcgccgtatagcctctagcaaaggcctggatttgagtggtatgccctccacgattgatttatccgagacgtccagcgttgcccaatctacggagtcggatataccaagagagataagcaactcgaggttgcaacaagatcagggtagcgaatcaatggcctctcagggagttcttgacgatgaaggaaaggaagatacactgtttcaagagtccgaagagccacgaaaatctcgagacatcgtacggagcctttccgccgtgcttgacactgatatcgccatgtcagagtggatttcggacccgaccgacgcaaattttgaagagttattattagtgatgatcgggcccaacgtatagttgcgctctcccatggaatgtgggctataatgagtaacttgttcaactgggtaaatttggcatgttgttattcgcaccatacagatcacatgatacccatattagataaccaatctaatttattacataatcagtgtcgggcaccgcaaaataggtacgcatatgacgtcatatacgtggaagcacatgttaaattcaacaaaaggaccaaatttgttgggccgtatctgatttcaactcttataccatagatgtcgttctctacatcgctctgcttttctctaatgtcacctcatattatgtaggcacgtcatcaacaacatgattggaacatctactgccgagtacttgttcattcggctttgcatcctatttcttcacaacatcgcaccaatcagtattttatacagcgttcaattactcgtcgctcaattctttcatctaccaacttatttcgaacgcatacccttggctatccaaatttggctcattgcagaagccgtctttttcacatttgtctacataccacttacatacgcccttcgcaattctcctatctaccacaaacctttgtccacagagctcagagaacatctgtttcggagctgcaataagaatgtgcccaatgtggagaaatacctcagccaatggcttatggtctcagaagctgaatgcataaagcgcgataatgtgaaagactttatcagatggtcattattcggacctgaccatattctcgagcaagaccagcagcatgaagaggaaatcgagacctacacagtagaaattgagaagctgattggacgaaaattgtcaccgggcaggatggatgtgaaaggcctaggacggcttttgaatgaagcagggggttcacatcgaagtctgctatggtacagtgttagtactcgcttcctcctctctatgtgtggtatagccattttgaactgacattccaattaacttagtgcatttccgtggttgataccataacgtactgcaggatgttatacaatggattccacttctatcgcaattcgttctcgcgattctttaccgtctttccatttcgccctgtcacaatattcacgtcttaccgatcaccggtgcggcatctcacatactggcatcgacgacatacatccaagacacagctacccgtactattcatacatggtatcgggattggcatgtacccttacgcaggcttcctgcgagagttaaacgagcaactacaggcagacgccaccgacgatggtgagatcggcatcatcgcacttgaaatcatggcagtaagctctcggataaccaatcctgctctcgaaaaggaggtgatgatttctgagatcatggaaatcatgcggtatcacggatgggacaagatcgtgcttgtgtctcattcttatggttccgtaatcgctacacaccttctcaagtctgatcggttcgctccgctcatcgggcctgcggtcttcattgatccggtgtcattccttctccatctgcctgacgtggcatacaacttcatagcccgccaaccagcgcgggccaatgaatatcagctatggtatttcggaagtcaagacattggagttgcgcatacgttagcaaggagattctcttgggttgacaatattatttggaaggaggagctcggggtgaaggtggaaaaagatcaaaagggtagaaatgttacagttgttttgagtggtaaagatttgattgtggacaccgaaaccgtggggcagtacttgatgggttcatcagaggtctggacagttgacaaggaagcagcacaagcatggaaaatcaggccctggattgggtgcggacttgagacgctgtggtttgaagacttggatcatgctcaggtttttgattctgagactaccaggcggccggtcatcaaggcgatctctgtatactcaaagaccgactgacactgttctgttcgtgtgtcatgtcagtccatgattacgacattttcacgaagtttcttgtgatacaccggtttaagatgcgaatatgcccaatactacctcttagttcaagaacaatagataagtatacttgtccctgtcgtatatcaagggacctaactacaaattaggtagcgaaattgataaggtacaggattccatcatgttggtactcatgcgattgactaggggtttagataatgcaagtattcagacagacgttgctaatgtatccgaggtatatagcttatacttttcttttgctatgcggaattgagatgttgagtcgaatacacattatcattgaataaaaaacataaaaaacataaacaactggatactccaggtccttttttccaactcaagatcaccccaactcaacctttccctccgtcccagcaccccaagccaaaaacccactcgcattgaacgccctcctgctctccacaacactcttcaagtactcaaaatcccaacaccgtctcgcaaacccgccccccaaaaacccatgctccttatccactgccggctcaagcgtactatccgctgaacaggtaatagcctgggcaaggtaatcaaagcagtgcgctacatggacagagcggttccggccgaagtcgaagcgttgtagctcgggtgtggtggtgtaataggctcgccggaggaggtagaggcagtggagttggtggaaggcggaaggaattaccacagaagaggactttgacctcgaggtatctgcggttgaggggatgaagtagcccaggccgtctgcggattctgttattactatatcttatagtaggtgatgagatgaggtgattgaaagagaaataagaacctactgggtattaaagtatcccatgtcggctccgagacgttcccttcaagcggtggttcctttgagaagggggattgatacgtgaattcacctgctatttggcggaggggcaggtgaggtgctatagatatgttttctggagtcccggattcatagctgtgcgtcgttgttgcattggagatgtatatggtgaataatactccggttatgaatgccgtgataaaagagaagacgaagaatatgatgtgtgcgactgtaagttgtctgtttagtggttttctgagatgaggttgaggctcctcttctccgtctaagtcttccttcgcgtttgagaggggcttatactcttgtgcttttgcagtcaacatggttgtacgatgaactaggagcatgtaaaaaaaaggtgaattcacagcttgaggacgctaaagtcgaaggaaacattagtacctgaacgaacccctgtgcgcttatgacgcatacagcaatgcatggtcccctttagtaataaaatcaaaaagccgcatcattatggtatgtaaagttaagttacttgagccagaaactatacgtacaatcaaaaagtcgtgaatgtattctaaactgcccagagagactaagagactacgtacaacatatcaccaaaaggcatgaagctaaaagtaaaacgctatgtgggctaccgttgttgatatatcaagttctatctatcacattctctatgctttttcggatcaccgactcgtttgtgaatcagttacgttattcgatggtggcctgcatatctagcccagtttgaaataggatggtacagagtaatgctgtaagatatcgcgcgtaatacttgacccaatatcaaatacagtgttgatctacgtatctcttagcattctagtacttttgatcacctttgcaatgatataagagctgagggggtgtaagcatactttacataccttttgagtgtatgactactattttgctgctgacctgcaggtaagagaggggttggatgcacgtatcctgcaatgtcagctcgagcgaggacgcatgccaatgcatatgcacctgttagtctatttggaggtggcttgccggtaataccagtaccaataaccagcattaatcgattaccagcatatagaatattgtatgcgtttgtaagagatactatatttattacctgtggcttatgtatgaaagttgggttctcgcccgagttggcatggcagggtagacgccctagactggacgatcagcattcatccaggttggacttggaagtatgtggtactattcattcatagtaaacaaattgttatattaatagtatccctttcctcttgttgaataagcatctcacagcgccagctttccaacttccatcaacatcatctttgacatctctatcctccactttacaacaacaaaagagagctcagccactcataatgcatgtatacctcctcgtcattgccttcctaggcgccatggcattgggtgcacccgcacccactgagagtaagtatcacaagcagagacaccctactgttggactaggctgacacatgctatcaagccgctgcggttgtcagacccgtcaaggttgccaaagaggacaatagagatagcaagacagatagcaacgggaagaatgtgtttttcgcagatgggttctagagggggtttctctggaaaagccagaagttgtatcttcaaactatacttgggattcgcaagatgtcgttctcgatcgttagtttattatggggccaatcctagtcctaggtctacatacaagagatcttctctcttctctcaaacacaaccgtactacttctatacctccccagccagccctgtcgcaatcgactcttcaggtaacccgaccaagatctcctcctcgggtacatacccctcatcaaccacgtagccactcccctctggacaatgcataaaccttttcaacccagtctcatcctccggcttctcaggccgtctataacaagacgtatgagctttcgcccaattttccaactccccccagttccgacaaacccgattctgcccaactccactaacaacctcgacccttctctccgtagcccgaggtgtatcatccgcatcacatataatctgtcgcctcagcgcatcaagacaatgcgcgatatggtgccaggttctcgtctgtgtctggccttcccgaaactcgaaaaggctgatatagatgatcttaagacagtgcagattgtggaagccatggaggatgtagattcctttgctggtgtcccagggaaagcgctgcgctgtgcggaggttgtgggatgtagcgaaggagtctgggagggcaacaacgccgctgtcgatgtttatggagtgccatagggtatccgcaagggtggtatttggggaggagtaatcggttaggaggacgtagggctctgtgtgagtgaggtggaggtcggcgtattttgaatgagttctatagggttcggggtttgcggcgatgatggagatggtgattatattggtgataagagatagaagcagtataggaattaggaagaggaatcgctgcctgtaggggttcgagtttccagggccatctgcagagatgtttggatcctggctcgtcttgtcaatattgttgagaagaccggcgaattcttccctattctcagatggtgtcgtcctcatggtaggcagatagactcttccataattttttacttgaatcggagggtcataagactagagtcggattgacataatttctcacaccgaaattctgtagtccaaccaagtcaaacgatgtacacccctgcattcatcacgcccgcctgcagcggttactcgaaaatcttgccttaacatattccaaatcaaaccacctggattttcgcccctctaggagtcagacacttagctgcaagtcacctagtcgagtaagaatagcgagctactagtggtcatgcatgcatccctggtattcgtacgacctgcggctatcccttagctggccagtgatcgttttaattatcaactcggttgccttcactaaccagacttattcatctttaatattgagatgtattccgatattagcatctactatactatacaaaaattccagcccaagcgcattttgatgcaagacgtttagcgatggaataccaccgcgccctcctccacgtcaacgaccgcacagggttaatagttatgacatcgatatttttcctgacagggatattcgcggtatcactccgcttctactccagacgactctcaaaagtcccactaggacttgatgactggtttgctttgtcttctcttgtgggtccatctcgaaccccaaagacttacagcgacggtatactgatatagagatgagcagttcttcgtcctcgccttaaacggaatcttcctctcaggcgtaatacaaggtgcaataaccggtcactctatagttctcaataactggccccagcccagcgcgctcgaagtcctagtccagaaatacaaatatgctttccagacaacagagaagatcgcctttgggctgataaaaacttccattttactgctatggaagcggatgctaagtcccattcgctctttccagctgttgtgctgggttatgattgggattgttgctgcttggagtatatctttcttcttcgcgaccttgtttcaatgcggaacgcactgggactggaattgggcgccgatcgggttttttctaacagagtgtacggatacgctgaatatgctgactgttttttgtgggacggatgtcctgacggattttgtgatcatgttgatgcctgtgccgatcatttggaagttgaagatgtcggtcaagaagaagattggggtcacgagtgtgtttatggttggtatattgtatgttctttctcatctcatccagtagagagttagcgtgagattccagatgctaactttcgttctcacagcacgatcggcgcaggagttgcgaggacatatatctatctcgtgacatcctatgataaagaggataaccttgatttcattgccgacttcacgctgtttatcctgtggtcggaaatcgaggtcaatgtggctatgattgtttgctgcatgccagtctttggacctgttcttggtcaatgtcgtgacactctgtaccgccgttttggtcggtcaaaggatggcgagttcggtctccttgggccttcgacatcggaatcgacaaatgacggcaagacacgcctcgccagtttcagcgcttcgaacagatcctatccacattatgagtagggttgctgcgaagcaaaactcgatgtctctggtggataatgttcgaacataaagttatgctagcgttatactagctaaagccaggaggattcaatattaaagggagatctacgtccggaataatactgtatctcctattactatgttgtacatagtccatgggtctttttggattttagtttaatgattattatgcacgtttttgttaatttcctgactaaagagtaagaccggctgaaatagaagaagcaggcaaccaactatgtagcttcgaacccttccggctgatcggcagaatatcacagtagctatccgacaacaaaccgcttcaggtatatgctctgtaggaaagaagggaatgtataattgactcagtctggtgcagctccgtagcaaataaagcaagcgaagtggcaataaaaaaaagtaaacatcatccttaccagatagcccccaacggcacctcaccgactctttaaatttccttctcacattcttcctcatccatcatcaggcttttaaggggctcagacctcgcataatcgaaaaaatcatttcagcagtcatggctaaccgcttgtttgcatccgtggtagccgttattctggcaatcagcgcaatctactaccaggaacttttggatacgatttatccaagtgacaaaataaaagtggtggacaccacgcgagatatcacttaccttggcagtctatcccctgctggaattgaacatttccaaaacattttctatgcagaggaacccacgggactgcgacgtttcgcagcgccggttccaacgagaccagtgaaagggtctatcatcgacgccacccaggctggtgcctggtgtccacaaggaacgggagatatactcccgttcacgagtagtgtgaccaacatcagcgaaaattgtctgagcttgagaattgcgagaccggcaggaacgcagaaagatgctaagtttccagttgcgctttggattcatggaggtgagtttactgtttgtgaagacatgagcgctgaagacactaatgagtagacaggtggccatgctttaggctcagcttccgatatcctttacgagcctgatggcttggtaaagctggctgctgctgatgggctcccgctggtatatgttggcataaattatcgcctgggctgtaagttatatatcaagagtctttgaaactctgtgccgaggcttacttccggtttagtatttggcttcgcaactagtcgagcattgattgagaggaaagacacaaatgcagggcttcgggatcagcgcgctgctttggagtgtatgtatctcggtgctctttgatcgcgaaatgatcacgaatgctgagaaaccgaacaatcaggggtccgcaataacatcgagtcattcggcggtgaccctaatagaggtatactcacttctatttcccgggttcaagcaccaatatactaatagattttcttctagtgaccgtcattggacaaagcgtcggggctagtgacatcggtctgcagctaacggcctttggaggtgatcaagatgttccatttcagcaagcagtgtaagtgagtcgagccttgaaactgtttcaatgctgattcgcggccttagaatgatgtctggaggtccgggactgaacttcaacagccaaccagacctagttgcaagcaacacggctgctgttgcacagcaagtaggatgtgctagtgacaacgatttgcagacactcgaatgtcttcgaggggttccctttgaacaactaaccaacctatcggttactgcatctcgggcagcccgtccgcctttcggtgaagcttatttttacccaacgatcgacaatgacttcattcaagatagaccctcgcagttgatacgtgcaggaaagttcaccaagggaatacccctgatagcttcctgggtcacaaatgatggcgcttggtatgcgccgccgacaactgcgacggacgacgaagtcctagggagttttggactatggctgcacaaactttcaacatccacgaaagagaaactcctacagctgtatcctctagaggacttcaagcacatgatcaagtcagagcatgaaggtcaaatttcaccgcagtactatcgcgctgcacagctgaaccgcgacatctggttcacttgccctgtccttgactttacatggcagtacgtcaaaaatgggggtgtggcagcctcccaagtgcggctgtacgaattcaacgaaaccagatacgcgccagtctttgattccatgggtgtgtcaatgtggggtgtcgctcatctcagcgatatcccttacctattctacaatgacgacctacgggccggtgcagataactcggacccacagcttgcgttggctcgggattttagccggaagattattcggtttgtgcatggcagttctaaagaggcggacgatgaacttcagtcctggccgcctgctttctcggatgacttttcaaaaggttcattaagcgatatgcctagtcatatctcattgcagctgtttggtggccctcatggatcagtgcctactacatgtagcgaagacattggggctgatattgaggcccttaccgacgcagagaaagcgcttcattgggaaaagttgttcagtcgctgtgcatttctcaatgggcagcaatttagagaggaagccggggtgtgatgaaaacatgttatttggggtgcagactgccaacttactcgcgcagcccccgctacttagggagaatatttaggagtcattttgatttgaagctatcaaaatcacgtcgaattccttccatggtgcttgatgaacacacgattaaataccatgccctggtcggtcataaagaagccaccaagggtaccgtcccgtatatacccactcaaggtccacagccccgacaattgtaaggtctttctcgctttttatcagctcttctatgccagcgagcggataggctcagaataaacagtcgttggcgttggcagacctccaattcggtcaaaactgatctcagaatcaccgctaacctgccatattcgtacaggagatggaccacgacgcggattctgcatatcttcaaaatcttgcattaaagatattataccgtccgagttaatcactctttcaatttatcgtagactgctttctcattccaaaattattcctcccaattattcttttgctgcttgacaatgagtgatgtgacggtctagggaattgagtgtcgatatgagcccgggtcaagtgtgaagcgataaactgtacggcgttcatctcaaagctgcacattggttgcataaattggatgattattcaagtagattatctgaggcgatgagcttaatcaagacttctcttaaagtatgtttacctattactggctgtcgacacttttctctcttgagtcttcgaaggggtatttgctaggtggatagttaaggaaatctatatatggtgtagtgggggaccttgtcttccactacgtattgaccttgcctgtcctctctttattaagtggcttcattacgtaaccctggagtgatggaggatatatgtagaagatagagacagattgaatgtacacacctctacacctctctgagttgacttcttgggcagcgggcctgggttcctttgtatgcacagtcgggtatgaaactgaactgcgagtgctgaatcgacctgtatgccttagagtatacagccttgagcgttcccctctttaatggctaaacaaaataataaaagtatcttcctcgaccaggctgcgattaatgagaggaactagatggtcgtaagtgtcgtccgttgcccgtacactcgttgcacttaaatacattatgcattgaaggaaaggctcttatggatctatgaacccaagttatctatttaaaatgatagtaatgtttccttcgactggtttatccctatattccccttgaatctctccaagagcagatagttcccgttgcagtttttccggaagccatattttcgatagttgaacagactggatttacaaatgcgcgttcaaaaccctttggatatccgcatatgtgacccaacagcgtcgaagttcaaaatgacggagaacaggaaggtggatgttcgacaggaaatcaatcaaaacgggactgtcatctagacacagtgtttcgatatttcgtagtgcctctgccattctgtctcggagactacgatgacagacccttatctgagcgtagaacacagatatctggaaacatctaatcacaataccgttctctttggccacaaccatagcgtcgatgattgtttcgaggtgtgtcagaaatgagtagtccaatcatcaaagactcgaggtgcgaaccagagaaatgtgacccaaggggacttagcaggcagcatacattgctcctgtccagtctacagtcccctacgcacccaggatgggtgctctacgcaccatgacaggtaccatacttcaggcatcagcggggtcgtgacagttaataaaggtgtggtattcctaggttttattcctatagaaaggtttaacgtttgtaggctctcgcggtatataaatataatatttttctattacttatagtgacgggaaaatggtggtaaggcgaatgtatatgtggcagaaaaatctcaataaaatctctaactctctaaaatgacaaatgtccaggaaaaatgacaatcttgtgaacaacttagtaatcaaagacaaacaaaacaaaatgaaaggatgttttcggccgaaaaccgtggacttggtttttcggcggaaaaaacaaatgcgcctgtcacgtgatccatccgtaacaaggatgaaacattacagtatccagcacagattccgacagagaggaatctattgtcctcttgctatgcttcatgatattgttgcatatgcaaggttttagacgaccaaagcccccatttctgcgagtcttctagggtctggcccttcccccggttggtacgtagtagaggacccaacaccgtcttggttgaaactcaagccgctggtccccggaagttgggtagttgcaaggcctgccggattgcacatctccatccgcagctgcatgatccatcgtttgagtgatatattcgctctcccagcatcgaaatagaaatctatcaaggatgactgacccctggtaggatcggaacagatctctggccagttgatcgaacgccgcgcatttgaatccggctgtgcatccggctgcccgcgttctatatataggtcatcttgcaaaatgatctctcttccacggtaaccaagactagacaattggacaaactgcagcttggggctatctgccaacaattcgaagcttcgcttccagagttcctggatcttattgataacttcgagagatagcgaagaaccccaactactcctctcttctgtgagggggcctggatcttgtgctccgattatcgcatctgtcaagctgacattcttcatactcagtcgccttaaggttggcgctgctgtctgaagaaagcgcttgagattccccactgtcagctcaatggaatgaagatgaagttcttctagctgggaaaaccggatattctgggagagatcctgaaaatagagaggagacaattcttccaagggactccattgagcgaaggtcagaacctttaatttgggtgcgactgtgaccagtatactaagaagatgtttgaaggcgtcttcatcgaatgtatcgttttcgttatctttaatgcgaatgcacatatgtagagtcgtaagatcggtcaagagcgatagcagtgattgatactgtgactctgacagttttatagaccccaacttcatgccacatgcgatattgccgcacgtatggagggcgcggaccttgtggctagatttgattatagccttgaccatttgtgaaaatgctaaggccagaggcatagataacatcttccgctggaaacttgtaaatgttaaatgaacacttatatcatcgttgttgaactggttcttcagttcacgtaagccaaggcagcgaaatgaacgatagtttgcttccaggagaaattcaatggggtaacaccgtaagccgactgtggtggcgttttcgaggcgcggtaggcatttttcaagaaccgcagtaagttccgagtcgagaatagcacgatgttcttctagtgcagcttgataagaggtgaatagagcgtcaagctcagccttagcctcagttttattgaatggtggttcttccttttcaccgcgcattattctgaagatgcttctctgttgccggagcgccaatcccggacttctgaaacgttccttattcttttctggccacccctcgaacaagtttgggatgatccgaatttctcgaaccgagcctcgtaaggtttcactttctgcaatatcctccagattgtcaaggctttcacgggtgagaagaagtgataaaattttgaagtagcgcgttgcataggctagcttagttgttaaagttatagactaggtactcggcttaccgagaacggtagtctgtaggtaactttgtgttcaaccgaagacacaatatatagagctgctatcgaatcaaattgtaaggcaaattatagttttattacaataacccagccattgttaccaaggaatacagttgaagtagcgcgttgcataagcttccagtgtactgccatgtatttggtggcaagtgattctgagcgcaccccactcctgaggctccagatattcacaaatatgagacaatatctctggaggcaggattgtgatagacattttgtatgaatagtcacgtgaatggttagggatggggttggaaagtggaagagataattagaggaggtggcggcgtttgcagatttgaaggtagcgggagggtagcggcgggtaggtagaaggtagcagccctaatcttaggccccgtggtagacttctattcatatatttttggaaatgaagctaaacgagacatgagagcacttaatgtatctatctgacgctattactatctaggggcagagatcacccgacccaatggtaacgatgagatataagccatcttaccatcccacccacggctagtctattgttctgagctatctatagccctctatcgcacttaggctgatacatacgaccatagggtgtggaaaacagggcttcccgtccgctcagccgtacttannnnnnnnnnnnnnnnnnnnnnnnnnnnnnnnnnnnnnnnnnnnnnnnnnnnnnnnnnnnnnnnnnnnnnnnnnnnnnnnnnnnnnnnnnnnnnnnnnnnnnnnnnnnnnnnnnnnnnnnnnnnnnnnnnnnnnnnnnnnnnnnnnnnnnnnnnnnnnnnnnnnnnnnnnnnnnnnnnnnnnnnnnnnnnnnnnnnnnnnnnnnnnnnnnnnnnnnnnnnnnnnnnnnnnnnnnnnnnnnnnnnnnnnnnnnnnnnnnnnnnnnnnnnnnnnnnnnnnnnnnnnnnnnnnnnnnnnnnnnnnnnnnnnnnnnnnnnnnnnnnnnnnnnnnnnnnnnnnnnnnnnnnnnnnnnnnnnnnnnnnnnnnnnnnnnnnnnnnnnnnnnnnnnnnnnnnnnnnnnnnnnnnnnnnnnnnnnnnnnnnnnnnnnnnnnnnnnnnnnnnnnnnnnnnnnnnnnnnnnnnnnnnnnnnnnnnnnnnnnnnnnnnnnnnnnnnnnnnnnnnnnnnnnnnnnnnnnnnnnnnnnnnnnnnnnnnnnnnnnnnnnnnnnnnnnnnnnnnnnnnnnnnnnnnnnnnnnnnnnnnnnnnnnnnnnnnnnnnnnnnnnnnnnnnnnnnnnnnnnnnnnnnnnnnnnnnnnnnncgccggtgagttagtagttgggtgggtgaccaccagcgaatcctcactgttgtatgttttttatttttatttttaatattcgttcggaagccaaacgctttgcttcaccggctcttcacgccgatcaaatcaacacaaggcgctctggactatcctagacaatgcgtgtgacggaaggtcatcattgttcttgcgagctggtcatcattgtcacgattggcacttgcggaactcgttccttcccgtccgagagaacacgtttgcacaagcagtcgtaccttccttccagaataagcgaggatagggatttgcccccaaaggagtataaagaccccattgttgcttcacgtttgttttgttttctttttcttcttcatacttgatattcagttagaaatgcacttcttctattagaaagagcctggcacataacaatcatcaactgtccactagcccttttttgatgccactccagagaaatgtactttcccctggacaaacccaataatctattgagaattaggatataaaagaaaagctcgccatatttgggcgaatagaattgaatactcacaaggcaaccgaggctccagatatcaaccttcttatcctaatgggtaccgattgtgaattctggtgctcgtaaagctggagattgaatcgtatccgatgggtgattgtctgaacaagaagctaaaaccattgtaattatcgcccacaaagatgataagactagttatatatacaattaccgaagtcaactattctgatatgcggctcacgtatctccgagatgagcggcgtcctgatgacctcccggagtggccttgtaatactatacttattattgacccgtataggaacttcagatagatatttctcaatagtttgttccggattttctagctcgagtagtatattcgtaggtgtgatgtgccaggtctgaaagagtgcattgaatacagaataactaagatagagagaggaaggaagcaagttgtaaagtgggagacagctagttcttatagctgtgtcctgaccgttttgccaacaatgcaaacttcctatctagcaaacaatctagctaagaaaactagtaaataagcaatgtaaacgtcgaatacaaagcaaatatgctgtccattcggcccttcatgtttgaaatgatccagaaggggtaatacgtagtgccgacctccatggttgcttttcccagagatatcggatgatttctcgaggatttatcgctcaaaaatgtcgtgcgagctaccgtggcaatccgctattagtattttgagagccacatacctctgaacccttcagtacttggtaagctgtatatttaataaatatggaaaaccatactcacttggattccctagctaaccaaacggtagaatattgtccgtagcctagtttcctcaccactttgtatgtgccagagttgaaagtatctccaagcgaaacgggatggaagcctccagtagaatgaaagtctgcctcttctgttgtttgtttcactggatggagagatcttgatattggagaaacatattcaaaaacttttgcgagccaagcttgagaaattactcaagccaaagctttattgaatgcagtaatcatcttgagatgttatttgcaggtcttgtgtttttggaacctttggaacgctcgtcggacaaattatgaatgatcaaggtcaggaggtctagaaattaggtatgattttctagttcttattgtgccgcaccggccgtattagactgcagtgatacagatatttgcgaattaattggttgaattacgattctcactagcactagcggccaaattttcactacacattgtatttgagggccatagataagaattagttttgtcgtagtggtccgatccctcgcctataacggatcctcccataaatacatcgaatggtcatgcctcgttaagcttgatttttaaaatgttattatggtccacaacggggtctgtgttattgttacaccgaacaaaaatagagaaaaacatacaacagtgaggattcgctggtggtcacccacccaactactaactcaccggcgnnnnnnnnnnnnnnnnnnnnnnnnnnnnnnnnnnnnnnnnnnnnnnnnnnnnnnnnnnnnnnnnnnnnnnnnnnnnnnnnnnnnnnnnnnnnnnnnnnnnnnnnnnnnnnnnnnnnnnnnnnnnnnnnnnnnnnnnnnnnnnnnnnnnnnnnnnnnnnnnnnnnnnnnnnnnnnnnnnnnnnnnnnnnnnnnnnnnnnnnnnnnnnnnnnnnnnnnnnnnnnnnnnnnnnnnnnnnnnnnnnnnnnnnnnnnnnnnnnnnnnnnnnnnnnnnnnnnnnnnnnnnnnnnnnnnnnnnnnnnnnnnnnnnnnnnnnnnnnnnnnnnnnnnnnnnnnnnnnnnnnnnnnnnnnnnnnnnnnnnnnnnnnnnnnnnnnnnnnnnnnnnnnnnnnnnnnnnnnnnnnnnnnnnnnnnnnnnnaagtacggctgagcggacgggaagccctgttttccacaccctatggtcgtatgtatttgttacagcattagagggaatcatatagcaagataattggggttaaaagactgactgcaagaataacagaattggggtgaacaacggcagaatatcattggatcgtgttgtttcccttgaaacgctctgcatcttggcatctacacataactagaactggaatcattatacggagtacacgataggcagtactccttacaagctttttgaaacatattcgaaaatcccatccggcttgggaacagcggacttgacattctggatctctgtccccagacagacaagcacatcaaagagcttctgtggctccaattcgctcctagtgtgttctgccaccaggccgatgaacctcttaagctcatctccaaatcctttctgctctaggccaactacgacatatcgaagctcaggtacatttgtcatggatgcggcgtaccactggattatcgctttaacctgtctatttccgccaaaagcgccgcagccctagagtctagtggtgacaaaggagtagggcttccggacattcctgtaacaatgcgaggagaacgaggtgtaggccttcaccaattcccgatatagacaggctagtatcaggtccggaatgctcactccactatgtgcatgaccgctgtctacaaggttcaattccagggcgtccatgaatagcatgacccggtttcgccagtcagcagacgagggtattgctgatttctgctaggcagtattgaccaatagtaattaagtcacccatggcggctggaggcctccataaggcataaaggtggctttgcatgagtctgcagtaatgttgtacaagcacaagatgtctaggacttcgagttggacagggaagaggggaggctggaagtaaatgctagtccgcatatagacaaccgtgtttcaggtcgtcagtgatttcgaatatggctctatcttgttcgtggagataattttcatcaatgtacgcctctctacgacagtatgatttaaatctgtttatgtagtgactgcccaaagagctcttggggtttcgccctatagctgtcttattgtaaaagggactaagttgtgaaaggacctggtataataatcttcctatatgtccaaactggtatataaattgtatattgcgagcatagcgttcttccctataactcactagaagatgccctatccttctcacgcttcccgggtcgattagctgacagtattgactgtgcataacgagggactttagtataccacattctatagtcgtatgtattcaatctagcactagagagaattatagaataaattaaattcaaactcaatatgtttaggtaatatccaaacctcgaatcaattatcgccagaatattggcacccactggtcataatctccttcttttccaaattccaccgcctgcgagtccttccttaatagatagagctccgcctcgtctcgcaatttcctcgcctcgtcgttatcatacgaatcctgaagcagtgcttcggacagcttgaaaagcccccgcgcatgctcaacaggcattatgtcggcatggaacttggtaatctcgagagattcacgcagatgtttgctgcagtgaaaatcaattagactggtcccgaggggaaatacgatagctcagtgtatagatagtccggggacaaattttagaagatgaaggggaaatggggagaggagataaaaagaaggaacgttcacctacacagctgcctccactttcccctgatcaagacataccacccccgttttgtataagcatccggcgttgaaaggatgcaattttgtctggtcccctttaagccacagattatgtgcctcgataaaatttgcttctgccgcctcgaagctatttcttcgacgctcaagcagtcccaagacaaagtatgcgctgtggggacgggtcagcaacgaacatctcttgtaaacacccttgtgtaggcaagcagagacctactaagccagcattgcccagttaagcggtagttcctgcttgaactcggtgattgaaatgtcaagcaattcttgcgccttgtcatattgaccaagatacatcaaacacctggccatattcttcttcgtcaccgtcggccaacaaattcccctcccctccttgacattccaggcaatccatgtatccttcgacttttcaaaccatatcaaggccatctcatgattattggccgtgttataattgtaagccaggttctgctcaaatccgccgagaagtccgcctttcaacggaatttcatgcaatcgcatttcgtaacccttggtgttgagctcaattgcattttgcacctttcccgtgctctcgtacatgctggcttgaagggatagcgtccaagcggcgatatcagtggccttttctttatcctcaagtgcttccacagccagcatattcacttcacacacgtcttcaagatccttgagtgcgttgatctcgtagagatatctggactggtcactatgtgactttcaaatcaatgcaaaatatcagacacgcttacctctgacaatccttaagaagctcacaaaatagcgatgataccctgaaattcttcgagactcgccgctcttccttgaacttatccacaagactgagaacgtgttgaaggcaacgattgcacccagtccactctagatatagttggttctgattagctccatcggactgcttgggaaacgcacgatacacgatcgcggttgcgttggcgaaagctttctgtcgctcatcaagagagaggaaatatctaaattgagtctgcaccatccgatggcaagaaaatacacgagcatctctgtcacgtttgatcaaagcaagggtaaggaggggctctgttgcctccgagaaactgcgctccaattaggttgagggtgcttccaagatagggctcctcatacctgaactcgtcggtacaaaactcaagatcttctggcagatcgctatcttcagcaagatcaaagagcagctgtggaattttctcagataccaagaatgacgcaattcctaagaatacccggctatccttccccagagtggcaaatgagagatcccacacagcctgtagctcagattggtgagcccgttttgggttcttcaaatagatttgcatgaattcagcaatagaccacgatcggcgatgaatcaatccggccatgtgcgagatggccaatgcatgaccactcagtttctgggaaagttcaattgccgaatcaccctccacttggatgtcactacctatattgcgtttcaacaggaatagcagaaactcggagcccattttcgcgtcccatgaggttatttccagaccagaagtggcaggctcgtatgccaaagaatggttgcgggtggtgataattgcctttccatgactggcctccggccagtatggcatcaatagatcggcagactcgacattgtcgtagaccactagccatctacagtctttctcatgtaatcaataagcaccaatagaaaacccttatagatgctctcgaggagtgacttaccagtcgtctggaaccaattctggacaaggatcaaattctcgttgtgcaagttgggttgcgcccccggtaacttcaagcgcattgcaatatctgtgaagctctgtcgtaaagaggctgtcttctcgccatagacccaaaacacagcttcgtattcgttcctctcaatcttttgctcaatatatcgtgctgcaatcgagctcttgccaatcccacctagaccaaagatagcaatggattggaaagatgtgtttgatcccacccgacctaagacctgatcgattttctcaaaagtctcgactctgtcgaaaaatcggggcgtctttctgcttggcagtatcatgcaacgaaattgctgcgcaagtgttgctgggtccggggagctgtggtgatctggacctgggagacgtgccgcaatcaacttttcgactcgcgcaacagtttcaatgagctcctggtttgtagaggtaaatcggcgctgaagcagcagccatgggtcattttgtcggtcacgactatcctcgtctcgtctatctgcgttatcggtattagtttgcctgtacagtagctctttcctttttgctacaactcaccatgacgcattacctcttcctcgccacgcatagacttcaccgcgctagtgaaaaattccactagctgaatctgaatatcaaagcatgcttcttttatttgttccggattgtccctcagcgcgacatagtagcctgtgaaggcctctgctttatatccaagagacttcaacatccgtggaattttggagagcgcttgcggatcttgagtagtaagctatcgcgttgtgagcggaattgaccgttgaagaatcaagcctaacggctaaatgctcacctggagtaggacgccgatgatgccccaaaagaaatcagcttggagaattggggccaactgagtctcgaatatttgtgtaaacttatagaggtggccaagcgttggtttgatcaaagcaatctcatatggaaccactacgccagcgcctgtgtctgccgatccccacacatatttctgcatcgaatcccaggaggtgatcgattttacctgcctcaagtcatctggctccagtgatttctcgcactgctcgatggttgctttccattgacggccgaagaagctttctctagcgtgaaatggtcagctaccaaacattggtatgctctccggttcgtgttggcaacctacaggtccgaggagtccatcgcgatgtggaggcagtagaaaagcggccgtaaagtggcaggatagtgtagcagaaagtaaatttcaagtgcgaggctcgttacttggtatgaaatggaaggaagggttctcgcagctagctgcatctgtaacagggcgtaacaaacattctgtgtgtatttccaaagccctttgtggaacagtgcatatgtggcgtttgttccagctaccaattaaaatcaaggtcaacgagaacgaaacataggctccaacagcaattatatcagttcttcgcaaaattgttagaacttccgaggatatcaatacaagaaatgaagctcttggaattagggctttgaagggtacgtagcaagccgatgattgaagtatcacgagcgttgggcgatttactctgagacatcaacggggcctggcccccgcagatccaaattatgcgggttttatcccgctttacgaagatcactctggcgatcacatagcatcttcagcaaatcaacaacactcattttgtagccattggcagtttacatgtacggtattggtattaaccccgaggcaccccgcgtcgaataaatagccatccatgctttcctggctgaatccgcccgggtttcttttatgtagtcttcctgtgaccacgcaccgctacttattctttgttttctcatccactatactatgctcacgacttgtcgcttataccatatagccatggtcaaaccagtgaaggttcaatacatcggatgggaggatgactttcgctacgccgaagagaaatctcggatcacagagcatattcaaaagattgcagaagataacggattttcccatgccttggtacagtgagtacatcctgaggtttacctgcgcaaacgaagcggatagctaatggaccttgggcaacatagagacatgatcatgagataccgctacagatcccaaggaccatggatagatgtgcatttcaagcgtgagcaatgggtcacaaacggagtagggaaatacgtgtttacaagattatggtttaatgaggatggggacctcgacaaggatccggagttcttcgaggtagaaaattgatatctggaataacctgagctactcggagactttcaatggatatataactggcctgcaatgtttcgtaaacataattaccggttagtagttacccagcgcactaggatttttcaataatgcgggtcaaagtacactggctggcggtcgactcccaaagtggaaaactggcgtaagccagtacccctcaccagctgcttcccaacctctagctaaccatccgacagattatgaagatacgtttttatcacttcaaaccgtcaagttaatgtgttggcctttttcacacaactcctatggcttcacgaatctacgcgccttccccttcgacattcgccgaggatccggatcgatatcgcgagaatggacttcatcctctcaccattggtgatatcctcaaattcggtagataccgaatagttcataagctgggctcaggaagctttgccaccgtctggctcggcagggacacatcagagaacaaatatgtctctctgaagatcttgtctgccgacacccctcttgactgtaaagagcttcggattttacaggagataactgaatctgaattaaaccacaaaggacgagagtttgttgttcagcttctcgaccattttaccatcgagggccccaacggccggcatctgtgcgttgtgacccctgtagccggagaccgtttggcgagaaagcccgggttgccttacaactccttggagtggcctcgaatcattggacttcagattgcagaagccttgggttatcttcacgtcttgggcattgcgcatggaggtcagtcttaatcgcattcaggtgcccgtggacaatgtttaacttcgaaacagattgttacacatccaatattctctcccaggttctcccatttgacgattggaccgaagaagagctctatgcttgcctaggacagcccgttaaacatcaagtacgtcgcttggatgggatgccaagggaagacaatgcccccgagtacacagtcgacccctgtgatataacagcactagaagctcgtctgtccacagaccgaattctcctcatcgacttcggagctgctttctatcaccacgaaagccctgagcagatcttcactccagctccattcgcatcccccgagattcttttcggcggcgagctcacgttcgcagtcgataattgggcatttgggtgccttctgtacgagctttgtgccgaccgcagtcttattaaattacttttcggatggaacaacgatgcgatgaaggaccaggtggctatgcttgggaagcctcctgatgctctctggcaaaactgggagggtaaggacaagtactttcaccccgatggaacaccaaaagaagcccacgataggcgtctgaaggtctacccactctccctgaagcaaagagtgcgaaacctggagaagcccctcagcgaacgaggctacggaacgggagacgaagcgccacttccaccagatctccagaacttgtttgaccttctcaatggtgtcataacttacgacgccaggtcccgcatgtcattcgaaggagtacaggctcatcctttcttcagaggcgttaatatcccggggtgttgacgatagtttatcgtcccagaagataagtgcacatttggttttgcatagccttttggagccatggtagcgatgagatattgagatggccggatcctggcaattgtgttttggtcatttttcctatcttctgtttctttgtctcggatttatctcgattctctaagaacatgagcatagctgtgtatgattgaatagcccgccactactgaattcactcatggtagaagcaaatccgtctttttcaacatataattttcatcggtacgaaccaagtcgttgacatcgactcaatacgttttctgacaacccactaaccagtcaccaggtgtaagtcagacacgatcattcgactggagctaacggaagaggacggaaataacactatattttgacagcctagctccccttgaggggaaattgattggagaatacgtctaaaatagcccgaagtgagattataacactgcaagcaacgcatgcctgaaaccgtggacacacgcgccaccaccaccaaccttggcgtgcaggaacataatattatgcgcaaatggtattcgggatacgccattgaagaggcatgttaacacgtaaagattcaaaaacggaccgacgctcgactaagaatataccgaaccccgctagaactgtccggggtcgaaacccgcgactttggcatacccaactggtgatttgcgcattggaaaggttgtacgggccacctagactcggcgcgtgcagataacaataacttggcgcataaattaaatgaatggtggaattgtaatatccgactttatctgctgatactcagctcaacgtttaccgaaaccccaaagcggctgcgtgcgttgagctgagtagtttgttacgcgtattcgatgcaccttccgacgagtaatatcgagcgattcatcccgtgattaacttgcagctagaatgggagctgtaggtctcagttgtggtacaatttcaaaaattggttattttttggtcatgtacctttcgcatacggatgtgatctgaaaagatacaagttctttacggttgggagcaggtaatgtatagcataaacaagtatcaatcttcattaaaataactctcaataatacctctcgcagtcgccatcatagaactgccgaggactacccttcgtaactcctgttgatctgatgcccccgattttgaaagtctgtttctcgtcttgacgagataaatgagctcccactatcgagtaacataaagcataaatcacttcctagtaagggtttgttagctgcgtacctttgcttgctattcgtaatactcacttgacagaccgcgagggcttaggcttctccttcgaaaagtcaacatcggctctaggatcgagcgcaatggttccgtgttgactcatgccgtacttggcgggattcatgccggcgtcaacatcatctttcatggtaatagcttctcccttaggagttgagcccatcaaggccgtataccactcccgccaaggctggacgaggtctgagttgatattttccgcgggcatgttgctggtctgtgattgggatttttctttgaagtgggaaaatttaggagttgagcttggaggttcggcaatgaattgggatatgtggtactatataactgttttatcggcaatgggaaattttgggctcgcagctttcaagagaccgcgacccctcttctagtctacgcaatgacgggtattccagtagttctcactaacaagcagtggaacacggtggtcaagtggttatcttgctcaacgtggaggaataccatttgacaaagatccctgtaggggcttacagggatggaagcagctacgtggaccttcggattgggctggtcctttgaaagagatgcacatgcaatcggttacagtctagtattgcctatacggcagttggtattatctgtagaaaatcccttatatacctcacgcacttccaccaagcaataagacccgcccattaactttgcacacagattataccatcaattagttatgccaatatggaaactacgatctcctatttagctcaagaccccattctcgacatcgaaaagccgttcgataccgacgtcccggttgatcacatccccggcgcacgcgcctcgaaccatcgtaacgatgagagagatgtgaaggtgtatccaatcactgatcttagcgaatgggacctcgagaaacatggtttctgcttcatcagagcaaaaacgggactgaatgctgaggatgcattgacaagaaagagggaggtacagaaaggttactggtatgagattgaagcgatcttgcacgaggctttcccacagtactcgagaattgagtgctatgattgcacggtattgtgttattctcagttctacactttgaattgtatctcacgcaatctgatgagatataggttagaaagagggacccggatttccctaccaatatcaggatctataccaaagtcgagcagccagcacgaagaccgcacagtgattgttcgcccaggggcgcgcacatgaatcttgagcgtgcgttcccaggacaggaaagcttttgggagggcaaggacttcgatattttgaagtaaaatgacccctgtcaagctacttacttgatatggactaaagtattcttcctagcgtttggcgaccactccgaggcccaaataatgactggcctctggcgatgtgtgactggacgactatcgacccttcaattgacgttcgcatcaacgatgccatcagacgtgatcgggttgatgagaatgccattctgcatttcaatgagaaccataaatggtatttcatgaaggatcagtcggtggaggacttgattgtctttcgtaacgctgattcctttgggaagcgtgctcgtaagcttgattcttacctatctggggagacatgtgatgaaatttatactgacgtctctgaagaaggattccactgttcggttttgaatccggagacgaatgggcagctcagggagagcgttgaagtcaggtgtgtagcatttcgctagggttgtggtgtacacggagtgttttcgtagcatagtatagcttcatgatgcaatcaattccagctgacttatcgcacaaagcgtcgagatgattcttcgtatgaaatgggaatcaaccaacaccattacctgattagtctgattgatttggctagtgaactgatccaaaaaaaaatgtaacgtgtactgttgcggcttagagtgagtccccatctggattctgcgggtgttgtatatttgcccgtaattgcccgtaattgcccgtaaggttcagaatacaaattttgacagaatcatttagttacaaggcataagcccttttaaaccttctgcaaattgggcttgggctatgcaattccctctttcagccgtcgactccagcactaagatgtttgaaagcggtacagagccaatcacccataccgaggcgagataagaattaattaccttcttggttaaggcttgcgttaccgattcaacgcctagagtcatttgactttttcggggtttcaaattgcatgggtgatggctcgttctgcagtccctgcatgcccggttgccagctcacgccccctcctgcctgaaaattcagtaccgccttctaaattgggtgcgacattggattttaccatcatttctgccactatagagtttcctgccaatattctgcccacgtctggtttacatagtaaaaaacattcattttgatcagaaaaaaaacgaacggagttatattctgcctgattcctatgatctaacccctgactatgaagcagtcattaatgaagcagtagttgataaagcatttgttgatgacgcagttggcgatgaagcagttgatgtgatagaagtgacataattttgttagttgtttacatactactccgtacaaactgcaggtatcgacggagtatgtactccgtactgtctcgctactcaaggttgtgtagggagtttgacactaaagcggtgtagatagcggtaagtaggagcaggtgtcaaagtatgatctattcctaaatagaaaggcggtattgaactttcagacccgtctaatattagtatctagtttctcgcgcatggtgccctagaatgcactaaaatccggtcacggcgttactggcattggattggatcttccgcagttttgcaatccgaggatcaacttgaactagccttggctataccgcagcagtttatgttggagctgaataatatgtctgcactattgcagcagcaagctggaaaacactcaaaagaattgaaatgccacccacccataacacagcccaaaatgtgtaccactgcaatggatttctccgatcccgccacaaatctctaattctactcggttgctgcttcagattgtacagctgcaccgccaagagacgagggccgaaatgcgggaagtcgtcccgggcggagtaggtatctgactcgatgagagaattatagagatcgatgttggaggtgggaaatagctcgactgggatcctagacttcgtgaagcggcggaggaagcgggactgcgtgaccgaggcgctgcagatggcgagaaggaatgggtcaatttccccggaaagtttcttggtttgctcgagtagttctaatgcaatttggcgggagtgtgaggactggccgaatagaagacggtatgagagtaacacttcacggtggagagaagatgcgtcgttggctaagctgtctgtataaaaattggatggaagaagctcagacgaaaccctggcagaaggttagacaattcgtgcaaatacatttttgagggcatgaaaagagctcactgatagagaacattgagttgctgtgtctgtaaaatgctgctcgcgcaaaatgttggcaaacagaacacggaaagtgtccgggattgtcgatcaaaagcaagatgagatgccagattctcaacccatttcaccctcacccgacctatcgtatatagagagtaacagttgacacttgattcgtaaagtatatctgtcgctgtagccccatcgtgtctagtatcttccaacgtacccttaatggcacggaataactttttgattggccttctggcagattgcccgaggggaatctcaccagattcccctggcctgctgccatactttgcgcgtaggaatagagtacgatcatttcccgatgcttcattggcctgaccaagttccaggtctgggtctatcgtcatagatgcccagcatagtactgcaaatattgcaagaagagtgtggtccttctcaagaggactgaatccggccgaatttcctttgatcaaatgatggtaaatcttctccatgctcacagtttcatctgcctgcaggctctggattccccggagcactgcaaggaaccagtgccagccatgaacagcattggatggtttctctcgcttgaggattttccagataatttcgaactcttcgcacagcaggctttcaaacttcctctccaaatggttgcataaaatatgtattcctggccattgttttgcatgtgagattccaagcccaaagagcaactctattgcttcgagatggatatccagggacatgtcttcggtggttgtagctacatgagccttgtattagtttgattttgattccttctagaacactaatctctcttacctggtttaggtttcatcgaaagcatagaaaatgatggctaggagaactgtatttagttgatgggaaccgacagaacacatcacaaatacagatacggcaaagctcacatgtatgatacctgcagggcgccgccatattgccgacaaaaaatctgaaatgtctctttttgcggggggttgtcgaccatcgtgagcttcgagatccgggtcagaaaccatgccgacgagagattggatatgtatggaacttctgacttcgacttcgacattggcccctgagacgcatttcaaaggaggtcaactcaaccctatgaccaagagaaagaagacgagtctgagtaagcaaagcaataccccccaagcgttgctaaccggattgagcgaggatacgatgtggttgtctcggacttcttcacccagttgcgtttgttatgcatgacgtggagtgatagcgcttaaaaaataagattacagtagagctgaactcttcttatttctcaatagctttttcgctccacagaaagaagtgaaaagctaagttgccactcgttatgcctccagcaggcaaaaattgctgctcttttatttcgacgtaggaaagacggccatcagcctgggaaggttccattgctgtatcgaccagatcttcatgtttcgaaagactcacgggtttatttatcggcggtttaggcgggttcatcactttcaaagtatccgagaagaggtaatgggcgggtatgcatggcttgtctcttgacttgtaaccacataaacttcatagaaaaacacgatacggtattttccatgcaaaagagaggggcggtaatgagctccgattggccacgtactagcgtggcgcgaggcgatcacacctgaagtcccacatcgggttcgattggaccaagggcttgataccctgctgcatccagtcagcgctagtcctgtgaccagcggccttcgaatttatgtttcaagtagtacataattgaaaaactagtggcattaaaatggcgtttttccaccttcccactgccgtcggagtcggccctccggaaccgcgaattgggttttttgacaggtttctcttgggagattcggtgacgatagtgtcagcttctcggttttattttaggcataatcaatgattgagaataaagaaagaaattgctcggtagaaaattctaccaatgtgtcctatagcatgtatgtgttctgtaatttcagtcaaagaatgtgagggcctgttgggtagcgcagccccaatccccaatccctgccaactacgctgactgagctcccctccccatcgcttttacggcgctacgtcttttggagcacgaatcagtctacccctcctccacattgaacatcgctccacgatagctaccttgcctttttccaagccttgaggtgaactgttttaactccccctgaacctcttatcattcataacctccctcaccgctgcatcaagtaccatgtccgttccccaaagctcctttaccccgcctcctggcacaccaatccatcagctagccataaagccgattttcgatgctcttgagccgcgggagaagttctatgctcactattgtgcaagggcagcatggcatgggagcagaattatcatgcggcaggtatcgccagaaagccctggcatcttcgacttcatcatggacctctatcatgcttgcgatggaaaatgggacaccttagtcacccaaagcaatatcacatccgaagagctcgaaagatttctggagtatgccgcaatgtttctctgcaacttaggaaactactatgtaagttcggcgagatctttctagcaacagcactgactgtgtaatcagggcgaaggagaccaaaagttcgtcccaaatctgacagccgaagcactgcaaaggatcgcaagcatctcccaaaagacgaaggaaggtctagacaaaatcatcggtccgctattggcagtcccgccattcaaccttggatatcccagcaagagcgcacagtcaggttattacactggcactgaactcatgtcacagaaggagattgctcgagtgtcggaggcaatgattgaacattccattgggccagagaatacccgagttcgaaagctaattcaggatggaaaacctatatatcatttgcttcaagcttccgcggagactggtgttcccgccaatggtctacacgaactggcaaatgacatattcatcgttagaggcgatcactcggtggaaatgtcgaacatctgctcggatctggcgagagcaaaagaatacgtcagcaacagcaggcaaacccggttcttggagctctacatcgaatcctttagtactggtagcctcgaagcttaccaggagtcacaaaaggcgtgggtaatggatgtgtctgcaagagtagagaatatgattggtttcatcgagagttatcgtgatccggctgggatcaggtcggagtgggaagctatgatcggaatttccgatccgggcgaaacattgaaattgaaacgctttgttgagagttcaacttctatcattcgacaactcccatgggcagtcgatggtgtcaacgatgggaaaggcccgtttgagaagagtctgtttgaagctcctgactttaccagcgtccacggtgagataaagattgtctcctcggcaagttaaaccatatactaattcccttagcgcttgctgtatgcggcagtgtcgtcttcgaagccgccaatcttcccaatgtaagctctggaaggggatttctggattgaatgaagctgacaatggagttagtacgaatatattcgagaaaattatggttttaagaatattgttctcgcaaatcgtctcagtgctaacaataaccccaatctaccagtgccttgggtcgatccatcagagttagagcacttccgcaagagcacacatattgtcagatttctcaccaccgctatccatgaactggtgggccatggaactggtatactcctcagcgaaaccgctccgggcatctacaactttgaccagcagaacccgccgatcagtccactgaacgggaaagccgtgacttcgcactatttacctggccaaacttggaatagcgtttttgaaaatttggcaggaacagtggaggaatgtcgtgccattctagtctcggaatatctcatggacaacaaggatttgttgtgtattttcgggtacaccaataccagtgaaatcacggctgacgaccgtaagtgctaccacgaccgtgaatttagcttgcttactaacccaattttagtcctttataccacctatctcaacattggtgtcgatgggcttcaggctctcgaacattataactttgaaaatcaggcttgggggcaagtccaccaccaggtatgtattcctaccttttcatgctctagacttattaaaactaagctgctacctaggctcacttctccatcctgaaacaccttctccaagatggcggcggcgttatccaaatctcccatgaccccaataactccactctcaccgtccatatcgaccgggacaaaatcatctctcacggcaaaccctctttaggccgctacctctgtcgtctacatatatggcggtgtactgccgatatttcctcttgtaaggaattctatgagcccatgtgtgctgttgaggggatatacgaacagtggcgacagattgtgtgctcgaagccaaggccaagatggaaattcactcaacccaatacgtttgttgatggagaaaccgtggaggttaaactgtatgaggagaataacaagggaatcattcaatcatgggctgagagagggatttgaaggcatcaagattggagtgcatggcaaatagggtgtctttcctcaaattcctgaaatggatattctgccttccccgcttttaatatttccggcccgccccgtcgtgccttccgcgtatcagtcccactcaacgatacttttctaaaattaggtaccttttgtgtggtagtatacccatacaaaaggtacttataccccatattatgttctcaaccctctggctagttaaaggagaaataagggtttaaatcaacaacaaatcatagttaaattaattggctaataaaagaaatttcaaatatcttatatagagaagtaaagaccatatttatgaaagagatatatgtagagacatcaacgttctaccacttggagaatactcaatatttcttcctaatatgttaatagtaaataaaatggacctcctttagactatatattccctactatattttttgtaagtattcccagaagtgacaaaatctctgtttcatgttcatgtaccttttgtatgggtataccatataaaagacacctaaaaagaaaaatctcgtttcgtgagaatctctcgttatgtgggacagacccatacctggtacagttatgggggtggtaagacggctaatatccatctcttgtacttggtatctggaaggagatgcactacgtattacacatgtgttccctctttgcttgttgtaatacattttgatggatatattcttcgttcttcctagctacatgattatctccgcggtcaattctccattttgattaaccatgggaaatcatacccaaatgacattccctgaatcaaacccattggcctcattgctccatggaagtatataacttcgctggttactcacaaccctaatccccctctccttaaactccgttgagtaatgtgtatgcccgaagacccagtttttcacaccattccacggctgcgataataagtctgtggcaaatgcagcactccaaggattcttcgcatgctgtggactcgatgtacggtgcatagcgggtgcatgatgtgttgcgaccagaatcgaccgtttcgataattccgtaggatttgttttgtggttattataaatcgattggacctcattgcgtagccaattcaagtcggactcatgcgccgcattatgctcgtcgaccgtccaatccttgattttctggaaatcctggattttgtaatggacaatatctctggagttttcgggaatattagaccaaaaagtaaatcccagtacggtgacatgggagtctgggatgtcatatcgtcgttggtggagtaaaatgagtcgtccatttaaagatggctcttgttcaagtcgcctcactgtttcgaaagccaactcaaaggatccgccatagaactcatgattgccgaggataactcaaatttctccacttgcctttggaggaaacgaaggtattgatcgtagtctgctaaacgcccaatacccccggccagcagcagatatttggagacaactggcacgtcaaatgatgtgtattgctggttcacttccaagtgaagatcagaaagagtatgaatggagacagacggctggctgaacaattttcggataaattgggccatcatagccttgaacaggctccagaggctgagagaaaagtacggagtaaaacatcaggtgggtttggtgggtagtcatgtgactggcaagtggatcagctgatctctctagcgttatctatccaaacttccagcaccctggagatgtccagcatgggctcctagggtaggagatctctctaccctataatcgtctgcagtcctccatcttgtacatacgatcatagggtgtggaaaatagggcttcccgtccgctcagccgtactcaagccacacgccggtgagttagtagttgggtgggtgaccaccagcgaatcctcactgttgtatgttttttgtctttttttgttcagtttagtaatagtagcatagttatccatctagtcccgctgtggacctctattaataatctttttagaaatgaagcttgacgagacataagcacttgacgtgtatatctgacgctatgaccatctatgcagaggtcacctgacctgatggagataagccggcccacggataattctcggctattctatcttcccagggtcctatcatgtgatccccatctccccaccttttcgactatgtagtcccaacaacaccttatgaccaagaacaagatccccgtgggcctccggctcctctagtggggaattcaatcaacaaattgcgctctatcacatttagtttgggagtgctccagggagttgagaaatgtcttcttaatttaccttactgcctcggaaacaagaacaacaagcagctattaatggatgacggttggattcgctttatcatcaatgcatgtacaacacggacattagcgcatgcagccatgaagcttcatattgatttcggtacgttataacatcaagaattaagtggaccctggaccctggtaatagcagaatttccctcgcaatatttcctccctcgcaatatttcctccctcccaatatttcctggttgttcgtgtaggcataacagtgctcaacaaaggcgagagaactacatcaagcctccataagtttgcccatcttcactgcgcttctcatccttcgtgaagtatttcttgaggcgttcctcgtctttcttcagctgggaacgcagcccgccctcgtttgcgtgatgcttgtcctgggcggcatggtcctcgccgaccttatgtttgtcctgggcggcatggtcatggtcttcaccgtgaggcttgtccttggtagcctggttctcgcttccatgcttgtggtgatcatggtggtggtggcggtcgaggatcttctcgaagaaggaatccttgtgttcgagcttcggggcgtctacattgaacctcgggttagaatctgggggttagaaggcttaagtaaaaagtcacgaaccttcagtcatcgtgggcaaatttgatgaaaaatatatagtgtagaattctggaaattgtatcttatttggggtttaaaaatgctccgctaggtgatgtcaaagactctttcatctactatatatacatctcttgaacgtacgatacttcgtgaactgtcggaatgaaccttggtaatgacgtgttgatcgatctctaatcggccaatcagagggcctcgggaggtatcgggtatagagtcgataggtataagcagtactgtcatagataattgatctacttactccggcacgagtcaaccgatactagcaaatttgaagacaaaactacgtagtgcctagataaccccataaaaattcattgatcagcatagtcaaatggcattctatctgcgatataaatgactgttttcaaatcaattgtatgtgagaatcagtgtccgcaattcgaaatcaacacaacgcatgggataatgtgactatgcaacaaagtattgtgcaaatagatagcggaaagcattgcctgtagagactgctccgggccgtttcacagcctgatgtgcttctcttccctcttttctcgatactatcaccattttaatccaattctcgttcccgtgcctgctccggtaaaaacgtaaaagttcctccggaacactatatctgcccctagctcacgctggcaagtgatctatcttctgtctgccttccctctatcatgtcgcctattctagctcaatggtgccagggggctttgaggttctagaaagacaaaatgtcagcgcatggctcaagaccaatagaggctaagacttatacttacaaatcatagacgacacgggcaacaccctccaccttgttgcaaatggcgcgcgaaacatcctagggtagacaggtttgtaagtataggaaataatgaaattgggcctttgtgggaagggatggagtgggttgggtccgtggtataggacccacccgcccgccttgcggagagcccgaagtataaccaagacctgactcacctggaggaaggagttactgaagtcaaacacttctgcgctcatgaaatccttggtacgaacagcacggagaatcacaatgtaaccccaaactcgctgatcaccgaatacaccaacactgcggttagtatcgagaccagcaaaggcttgagatatctgtgggagaagagttagtttgcacccgtcttcgcctgtgtgacccgacttacctggtcgtaaaggccggcctccttgatcatgctgatgaagatgtggtcagccttacgggcgatctctactcgctccttggtaacgtcgccgaggatgcgaatggcaatgccaggacccgggaaggggtgtcggttcactagtgactcgtgtatgccgagctgtcggccaatggccctcacttcatccttgaacaaaagtctaagcggctcaataagctgtaacagaagtcccgtcagctttctctgcgttgatgaagagatggaaagtatacttacacgcaagccttgctaaacgggccatgttggttagtaagtaaatcaaacgatactagattagctcgacttacgccgttcatcatccgctaatgctggttagttaagatccttttatattcgggacggtggtattgcttacctcaggcagaccgccaacgttgtggtgagctatttctaatgtcagcttttgttctctcttttgtccgtggggcagtcttctgctcccgagacctcgttgactctcttactcttgatagtggccgaaggcccgcggaagctcaaagattcaatactaaaatgttattagtttggaccaggcaatcagcgcagaatgacttacacgtcaggatatagtgtcccttgcaggaaccattccaccttcccggtgttgggggtgttttctgcctccttctcaatctgcaagtcctgttagctagccaaatagcctgtcagagaaggtcgagcgtaccctaatagcctctttctcgaacagatcgatgacttcaatgtcgttagtaccctgtcaccaacacatcccaaacagcttgaagtacgcacaagttgacccaatgatcttccgcttcttttcggggtcagaaacacccgccagacgacccaggaacagctcgccagcctcgacaactgtgagattaatgccaaggtgttcgccgagcgtggccttgacctcctcgcactcattgagacgcatacatccagtgtcgatgagaatggccttaaagcggtctccgatggcatcacgcatgagggctgctcccacagtgctatccacaccaccgctgacagctccaaggacgagtgctcggtcaccaacaagatcgcggatgcgagcgatctcgagctgagcgaagtcgcccattttccaactcggtttagcgccgcagatatcaacactgaagttgcggaggatctcgcttccgcggggtgtctagatctgaatattagagggagttatagtgtaataccttgggggtgacgaacgtgttcgagctcagggtggaattggacgcctagtcaccttgcattagcatattcccttactgggccacaaaggcagcttgggggaagacaaaccaaagatgggcttctcctcatgggcgatgccggcgtactctgagttcttggtgtccgcaatgatcacgaaaccctattagagtcaataaaagtgcttcggaaatacgaagtcatttcactcacagcaggcaggctaactagcttgtcgaagtgggacatgaacacaggaatttcatcccccaatccagcaaagaggcggtcgacattactattaaccttggtgattttgaggtcggcgtggccatactctgcgaggaaagggtcagaaataattttatatggtgttccgaaggttgcaaacctcgagtttctccgcgagcaacgttcgttgaatcgatccgccatgcgatctcctggcaaccgtagctgggtgatttgtattagtgtcgtaccgatgtcgatgttggaggaaggcataccaaatacccctataccccggtgttagtacaggttcagaaccttgagggatgggcggggaaaacactcacagaataggtacattaaggtcaaaaacagcggggtcaacatctacacatatgagtacaggcaacaggacgttcgggggatgaaaaccttacggggcgagccctcgtcgtagacggaagaaggacctagtatcttagtcagacctcagcacaaaccatgtgttaagagacttcatacctccagagaacacaattcctttgggcttccatgtcagctcagcgatcttggtggtacacggaagcagctcagcgaagacaccgagagcccgaagccgacgtaggataagatggctcgtttgagacttcacaaggggagtcagcatttggcatttgaagagggccaggagccggccagcagtaatgaagctccgttatctgaaacaggccgaaagagaggaaagatggcgctcgagatttacatacgccaaaatcaagaacgaggatagtctagagagtcaattgtcagtcaatccgttctttttgcgtttatgactcaattgcgccggcacggcctagggctgcttgatcgcaagttgctgaaagcgggacaagtgggtttcctggctcgccattgggatatgatggtacgtacgtcaaagttgttgtgaggctcttcggcctcgatagtgggagccattatgatcttggtttcggcagggtatcgaaaggattagcggggtgaagtgagggaaaaaaaaaatatgtttggtataattgtaccgcctccgcggccgcctcctaaataggacaccgccttcaaaatgctctatcgcgggtgaatccacgtgacgctgtacgctcttgaagaatcttttggatgtttggtagcatcttcttttcgaatagcaaagaaaaaaccacggcagactcgaaagcgccctgaaaaaggtggtatctgtcaatctagattgggtcgacttggtgacccactccagaattctcacctatatcacttacactcaccccaagaaaaagaaagaattgtcgcatccaggtcatcgtgacgccagcctgaagttcaattggggtatcttcaccagggtaggtgccgttacccctaggagccacaatgttgccattgctatgtcgtcggatagactagtagaatcggaataacgagcagaattggggtttcaagtgaacaagtaagaagacctgctgttgaaaatcaaatcgttccagaccctataagatgtatatgtgtcttgtcaacagctccatggttattgttttcaaggacgtcatggaacatgagcgctgcttatggcgaattcaatgcacatcaatggatgattgcactatgggatacaggtttctatgtaccaaatagattaaacccggccatacctgagctttattattgatcgaaaagtgatgaggaacaggaaacagacgtaggcaaatgttcgcgaccaaccctacgtgccaaggctgatcaatcctgtccgaggtaaacgccgacgcgataacttccaatgcaagtggagctcggaattttaacggacttttaaatgtcatgacattggtcggtttccccgacacaaaattatgacctgagagatcgtcgacgacattggggctcgggtaaaagccggagaccacagacctatgaaccccgtggggagtcgctccactatgattccactttgtcatctcttcccctttgggaaaggcaaatccaacttcgtgatttctacataaatacctttctaatccctatctaggagacttcattatcagtcaaccttcaacatgaagctcctcttgtcactgtgcctactcggtaccagcttgatgaccggagttgccgcgtcgcgcaaagaagtagtaagtggcacgtctgcggttgcaagcaagaaactcccctcaccaagacgaacgcagcggtcaacacatgaagctccaaaatgtgccaattctgcctccacgctatcccttagcgaccctccttacgacaactatttctactccgactgcaatgtagcggcccaggtagtcgtcactagtccattgccagatagtgacctttctttgatcgcacctcgtttgatcatagcttggcctgctggtgacagtggggcttgcgcatacttcgcgcctcaaaacggggtcaacgggtcattatcactcgagctcatcaattcaaccatcgggaagcccttggcacccatctacaccgcggagctatcaaattcatctaatacctatcccagtgtgggagttcaaggcgtactccggttcaattcgtctgcaacactgaccgtgcctgttctgggcagcatccgctcaatccgtgaattcagcgaaggaagtgtccttaggcctaagattcaggatgcgatcaagtttacttctaatagcgatgggagcgcctcgctccagcgactctggttcgataatgtcaccacaacaagcctccatttccgcccttggaataatggcagcaacagcgacaagggcagcatggtatcggtagatggtcgcaccgtgaaattcgaaacaggcgactatcttttttccgcggaaattaactatcctcagttatcccagaccagtccaaccgcagtgctgaacgaaaattctcaggagctaatctcgtctatgccggatcagacgaaggcgctttcatttatgtcatactcaagtaaggttctcgcaggcgcatggcattacctgacctattttggtcgtgactcaatgattactgcgcttttgttggagcctgttttgagtgttgggaatgcaagtgttatggaggcagtgattggttctgttttggagcgggttgatcgaacagatggaagtgtttgtcatgaggagactattgggtgggttttgtgttgcaatttccaatctggtggttctaagacatttgattggaagatgctcttctatatgatatgcatggctaactacgggatagggactatgcgacctggtctaacttgcaaaataatatcccaagcaacgcaatgggctgcgactacaaaatggtctgttgagtaatcactccagtgctattgtcccatcgggcaatatgaccaaagaggcaaagctaattgagtcttttatcaaacagattgattcggactattttctcccgatccttatgcaacggtattttctgcagaattctgttggtcaacagcgaatcaaaaccttcttcaagtaagaatttctaccctcctgatttataaaggaaatcactaatacttcttctctagtacaccggctggctcggccaatgtggcgaatcggaatttgaccttcggcgatctggctctaataaatgctgagcgaatcatgcgtcttgcgggcccgtttgctcataactctatcaaaaagaacctcattcatctcaaagagggccaagatatcggccaatggagagacagtgaatacggtgagcagaaccctgccttctcgaaaattcccagggtatatttgtaaattggacgctgatttttgacaaaactttgaaataggtatcggtggaggacgtataccctatgatgtaaacacggctctggtcccagcagccctgcgctctatcgcaagtcttgcacagaacaacagcatcttttcgggacgcaagaactggtctaaactcgccaatgcctacgcaactgtatgggaggacaagaccctggaatttttccgcttgaagatcccccggtccgaagcacaatcacttgttaaatcctacgtcaacgaatcctcctttgcaggacccaaccaggtctcatccattgacgacgatgttactttctatgcactggcactggacggcaacgacaaactttccaaggtgaaagtaatgaacacggatgactgcttcagacatttccttctcaatattaccaataacgcccagctcaccccgttcctcaaccaaactgccaataacatcagacgcacctttccggctggtctcatgactgatgcaggcatgatagttgccaatccggccttcggtggggatcctgtttatgcaaaaaactggacgacgggtgcttatcatggaaccgtcatttggtcatggcagcttgctatgatggcaaagggattggagatgcagcttgaacggtgtgagttgacaacggaaaagcttggtcataatggacagcagcacgcggcaacacccaaaccgaagttttgctctgataaatatgtctacgacaatgtcaaagccgcctataatgaactgtgggactcgattgagaagaatacttcgcagctctctgccgaagtttggtcttgggtttatcgtgacgatggcttccaggtcaccccgctaggagtgctgccaccccctggtggcggtagccagataggtaaggtcttctccggttatcagcatcatccgatttttttttcgtgttccttttttgctaattgcctttatatctgtagaatccaatattcaacagctttggtctctagcctttttggctgtttccaggaacaaagcttataaagattgaatgcaaatatctcagttcatgccgcttttatccgattccatcggaattcaatagatggacggttaacaatggtggaagacggcagctaactttccagtttactttcgaacgtgaaaccttccataccgatatgtgcagcatactttcatctgtatatactctttcaacaaggcaagctgctacaattaatctctacttttcatacttgcgatatatatatgcaagttcctatccgttagtgcattatataaaacaaggcatattcactactctcggtgctactcttttaattgttgactcttactaggctctatcacaactataaaatctctttccatgatgacgatcgttgaaaagagcgagcagaaacatggatatggaggatttaactaccgcctaccaaagatatatgcaacacagtgacggtaatggcgaacacaccttgaggatatcagtgtttaactagactgttgtacttctggagacaaaggatcgttcagatgatagcccttagagcaccgatagaggcgggtgtttcccacgcaatttccaaagcaggagcaagtatacggaggaccggccggaaaaatatctgccaagaccagcctagataagaatatagtgagtatggacatcacagatcacacgatgtccgaagtagctaaagactaactttaagccaagtacgactgatacgaactgtctagaggtccgttccgtgagactagaggcacccacacgccatactctgatacctatttagcttcagctgacgctggctgattccccataatgtgagtgaataatatcagatacagcacaagtattcatcaagttgtctaggtcagacctcgggagatgaaggggtggatctcctatattcgtcttagacaaatccttggcagcctcgaccatatttagagttccacccaatgtaacctaaagctgtggtctggtgcttagtaagacgtttaattgaaggcaatctcgtttagcctatttaatcaatttggtggtaatgcttggctttatcattgagtgaataataaatgcctatactccgtacagcttcgctttatttcaccgtgaacttgattggaccacacttaaattgataatatctccacagagtcgggagtaacacattagcagatcaagcgaaaaccatgcactattggcccggggagacaccggacgagaagcagggagggagacgaagtgatcaaagaaagaaacagtgaatactcatttgctcggtgtctcggtgtctcggcacagaaccgagaagtctaaataaattaaaataaggccgaacgaacatcacacccgagcacatgcagcagcaaatgtaaccctagctaaagggaggcgattaaagcgaaggtgatccgtcgggattccggctgccaagtgcttacctgctgactatagccggggtttctcccacgtaatccggaatcaaagtgacatgcattgcctaaattagggcgaaagtgtcggacaaagcgcaggatgggttagcgtcaaaactccaacaaattagcgtcaacggacctaccttatctaaagaatgctaggaatgccaccggaagtcggtggatacacatgaatatatatgctttctgtatcgtgctttgagactagtattatcctacagatatcacacctattaaaagattctagagactgttgacatataaaccaaaatcaattagaacataagacaggcgctagggaactcaatggaaagtagaaagggtccgagctctccggggctagcatgtcaacatcttagggcaaatgttatcatcagggccaaatagggggttctcaaaaaacgatcagggttcaattgttttttattatcgcggtgcgtggcaagacagttctgtcgccgcaagcatggtggctcatttcatggctgcatggtatcataaacatggtcagctcagtggtccgataagaatttattttggattataaagaggatcataggaccgaataaaatgcgcgatcagctctacagccatactccagcgtactgtcctcaagtatgtccaagtcgcctgtagaaaccagtgacttgtccacggtggctagccaggaagccattggcgagaagtatcctgctgctgtggttactaccaaagatgagcatggacatggtgaagatgacgccgacagcgatccggacgcgattatcatcaccggtgctgacgcagctattcatctcttatctcttcgagatgactttgacacggtcttgacctttcgcagtatattacttgcttccggccttgcgtgtttccaggctgtgatgaaccagatttatcaggtatttccaatccatctattgcccatagagatactaacaactcgttctatagttcaaaccgaccttgattacgattcaaggaaccttcatcgttctcatctcctactttgtcggcaatgcctgggcgagattccttccccgtggcgataaattcgaagctcgctggagggcgaaaggcggccagggagccctaccatggtggatcaaggtcataaagttcttcaactacgggccatggagtttgaaagaacatgcaatctgttcaatcactgctacgtcggcctcaaatgcggcgtctacctcaaccgtgtttgcagcacaggatctattctacaatcttcccctcacccccgcgactgtgatcttgagtactatctctattggcctgtttggctacgggatctgcggaattctgcgtcccatcgctgtctggcacacggaggccgtctactggagtagtttgcctaccgtcaagactctccagggacttcattggcaggaagtcaaaaactcgaaaccgcttcgatacttttggtatgcattcactggcatgtcaatatacgagatcattcctgcctacatcttcccgtggctaaactctgtgtctattccggtaagtggtatcgcaatgatctcttcagatgaactttctgattatgagaatctcattggaacaatttattaacttcggactttatagtgtttggctgcacaaaaggccactggggaaactggtgccgtactcaacaatatctttggtggggcaaccaacaatcagggtctcggtctattttcgttctcgttcgattggcaatatgtgagatgatgtccccctataacacattgatctatcaagtcatctaacagaagcagctcacctctttccaaacctcactccctctcaaactgcaaattcatcaggcagctggacttttttcctgcttctttattatgataggcatttattacggaaatggctggaattcgagatcacttccattcatgtcgacgagaatgctcacgaacaacggcaccacataccccctgcacgacgttttccccggtggtgtcctcgacgagactgccctgaccaagtttggcttgccgaggctcactggaacttttgcattcgccatgttcatggccaacgcagcaatgggtgccctgatcgttcattgcatcttattttggggcaaggatatccgtcgctcctataaaagcgcgagagagggtagatatgatgatcggcaccatgatcatatggccaagcattacaaagaggctccgtggtggtggtatatcgtcgtgcttgttggcagctttattctcggcataattgtgactgtgaaagaaaacatcaccttgtcggtttgggcatatgttatttcactgctagtaggatgcattatcgcccccttcgtgagtacaacgtcctcgatactgagcttcatgcagaaaaactgactatgaccgtgctatagagtgtcatcctctattctcgcttcggtaatggtattgcaaccaacaatttgtcaaaaatgctggctggactcatcctgcctggacgcccggtcggtaacatgtacttcgctgcctggtcgcataacgtcatttcaaatgcggttatgctttccaatgacctgaagatgggcgaataccgtgagtatctatgtcattgttttgatcaaagatatgtttttaacttatctcttagtcaaaatcccgccccggatcatgttcctgacacagttgtacggcacagttcttggtggtttcgtcaactacgccatcatgatctctattgtgtcaagcaatcgagcgcttctcaccgacggcaatggaaattcctcctggagtggtgcaggcatacaatcttacaacaccaatgccgcatcatgggctttggctccctatatctataagattggtaccccatacggggctatacctattggtttagccgttggagctggtgctgtggttgttcaccgcatcttttatcacgtgagtaaccccatagccttccctattgcacttggaactgacatccgtttgactcttagtttgtacccaaaatcggaaagctcgacgttgcggaaatcaatctcccgcagtacatccaatacgccggttatattccctacaaccaaagccagacctgcgtcatcttcacctggatcaccgccggattctacgttcaatattatctccgcaactataagccgcggattttcaaggattattcatatctcattaccggcgcctttgatggtgctagtttgacggttctcttcatcctctcgtttgctgttttcggcgctggtgggccttcgcacccattcccaacgtggtggggaaacaacgataatgggaactacgattggtgtccggtagtagagtaggggaagggagttagatgatagggaatttgaatccacagagaaagttggtcacgggagtgtgaatagtgctgtcgctgaactccgagccagaacaatgtcataattattatttaagttgcgggccgtggatctttgacgggcgaatatcgacatattcacggggcgagaaccagatggcggatagactgtagtctctgcggtagtaggcagtggttcgaacaatagcttcggtttattcttcgtcgaaacagtattcggtggcggaacgatatccatggggcaaaagggtagccattctggaggtttgtccggtacggggtcctagcaagaatcgcgactcgccagtgtacctccccgaacacttcttggggccgatgttatcgtatggagacgggactggatcacggacctgagtggctagaattcattgcacggggacttcaatagcgtttaagggaagttttactgttttcgcgagactattatctttccaagggatacatcacagtgagctctgattggctagtgacataaggacctcgctcctcacggtacgctctccaaccactatatcattatcgagctggcctatgccattgctatagtgaacaaacaaaaacaaaaacatacaacagtgaggattcgctggtggtcacccacccaactactaactcaccggcgnnnnnnnnnnnnnnnnnnnnnnnnnnnnnnnnnnnnnnnnnnnnnnnnnnnnnnnnnnnnnnnnnnnnnnnnnnnnnnnnnnnnnnnnnnnnnnnnnnnnnnnnnnnnnnnnnnnnnnnnnnnnnnnnnnnnnnnnnnnnnnnnnnnnnnnnnnnnnnnnnnnnnnnnnnnnnnnnnnnnnnnnnnnnnnnnnnnnnnnnnnnnnnnnnnnnnnnnnnnnnnnnnnnnnnnnnnnnnnnnnnnnnnnnnnnnnnnnnnnnnnnnnnnnnnnnnnnnnnnnnnnnnnnnnnnnnnnnnnnnnnnnnnnnnnnnnnnnnnnnnnnnnnnnnnnnnnnnnnnnnnnnnnnnnnnnnnnnnnnnnnnnnnnnnnnnnnnnnnnnnnnnnnnnnnnnnnnnnnnnnnnnnnnnnnnnnnnnnnnnnnnnnnnnnnnnnnnnnnnnnnnnnnnnnnnnnnnnnnnnnnnnnnnnnnnnnnnnnnnnnnnnnnnnnnnnnnnnnnnnnnnnnnnnnnnnnnnnnnnnnnnnnnnnnnnnnnnnnnnnnnnnnnnnnnnnnnnnnnnnnnnnnnnnnnnnnnnnnnnnnnnnnnnnnnnnnnnnnnnnnnnnnnnnnnnnnnnnnnnnnnnnnnnnnnnnnnnnnnnnnnnnnnnnnnnnnnnnnnnnnnnnnnnnnnnnnnnnnnnnnnnnnnnnnnnnnnnnnnnnnnnnnnnnnnnnnnnnnnnnnnnnnnnnnnnnnnnnnnnnnnnnnnnnnnnnnnnnnnnnnnnnnnnnnnnnnnnnnnnnnnnnnnnnnnnnnnnnnnnnnnnnnnnnnnnnnnnnnnnnnnnnnnnnnnnnnnnnnnnnnnnnnnnnnnnnnnnnnnnnnnnnnnnnnnnnnnnnnnnnnnngtgggcggacgggaagccctgttttccacaccctatggtcgtatgtatttgatacggcgctggaggggaacatagagcaggtgaaaattatgaactatagctgtggtaggatagatagagacggcttatgtttcatcattactattatgtcaggtgacctatgctctgtagatggtcatagcgtcagatatacacgtcaagtgcttatgtctcgttaaggtaaggcggcgttgtaaggtagagcgaggcacttgaaagcggcgtgctagttcgcgaatagtactaatttcttggttctcaaaagcctggatagctagtagtatacctatacgtatgtaataaaagttatacagtcgataaaactatatcttcttttcatgcacgccttgatgttccccaagatattaccgaaacaggcaaccccgagcgcggctgagcgtttatatgcgaaccttggaataaagaaccgtggtatatcttatctgattctaagaccaagagtggaagaaacataaaacaccaggaagggtaatatttgagcaagcgcaccaccagttctgtatacacaatttatcgaccgaagtacttgagctccaagtatcttgccggtaggtaagtcaaagccgtcacaacaaatgtaaactcgttggcaacatcaccaccgtaatctccaatcacgcgggcaaggggaccgataaaccaagtctcatccatgcccatgcaccacgccacaaccccaagggcaaacgccacgctcgcgccaattcccaacggaagcctagccgggtcgttccatccttcgagatcatagttttcaaagttgcccttacgaaagatatagtgttcctggaacaggataatggcataacttgtgcaccagtatcccagcagactcaggaaattttgaagatattcgttcagcttttggcgaccaccaattgacaaggcgatgatacaggcgaagcagaacaatgtccaaagagatcgaggaatgcgagcgaagggtcgggcaagttgctgaaaggagatagcggaactataaatgctaatgacgttgacgttgataccggacaaaacgaggagcgtaaggaggaacttggcgaatccgcgaggatgaagcatctcttgaatgagatagccaatccctttctcatatgcggcggaccagtcgggcttagtgttcaaagcggacgcgaccatgcaaccagcgaccatgccgatcgaggtgggaatcgagataccaaaagttgtcatgaggaaaatcttcaaacgactcgtgttggcaggatattgaacatagtagtcgctagccattgtgcaccacgaggcactggatccgtaaacaacggccattagactgagaacggcaccggagagagtcgaaccagtcacggtagccggggccgcattgtctgcatattcaccggtctcgccgtagatgatcaaaaaaataaccaaaaacaccatccaggcccatctctcgtaaatcaaaatggccttcaacccgacgcaagaaataaacagggccaccacagccaaaataacaattcccagaatcaacgagacgtggccatcggagactgccgtcaacgcaagacccccagtgatacatgcgacagcagcccatcccatttgctggataccgttcagcaaggcgaccagcttattaggccaccaaccaaagctgtaccgactaacactgatttgacgtaagccagtcaccgcgccaaaggttgcacagaacccagtcagcgatgcagccaagattgaaacaaatatggtaatgaggatcgattgtttcatagtcaggccgaattcccagccgaggaagccagtcgcaaagcaggaggtgttcatcgtgccactcgcccacagagccgccattgatatctcctccacccatcgtacctttcttttatcttcagcacgcttgcgctcgatggtatcaggctctataccgagtttcttatccagtcgagcctccagggcgcgaatcctagccaggataccggtctcttgagaggcattatcgtcaagtgagatcacctcaggtgaattgtatttttcagttgggtgttggcctgttgcaaggcctttctccggatcataggccatgatttctgatggagtgagacgcggcgatgggaaaacaaggggcggcactctgtggccacctggggaatcggtgaatttttcaggctggggaaaaaagataaggcttgtatgggagaaggtttgccagctccactccggcgctgtttcccaatctggtacataagtagttagcggattcagtaggttacattggccgcatgtactccgtactaactggttagtttgaatcttggcttcctttcggttgatatttcctacccacacacgccacacgggccccttagtaattacgtggcgccacggggctatctacagactccgcttatcgaaaaatgtaataagaatcgggtgtaggatttcgcgagtggtgaatctatgtgctattttatatacaatataaggattggcctacattcagggcttaggagttcaaaacttgtaaatattggagttgtggatcacaaaaagattggcgtataacagtatccattctcgtctgtcaataggtcggtgttggaatagataacaagccttgcccagaaacttggctcgcctcgggaggctaatctcacccgccctatctgatactcgtgaagccacgtgatacggcacgagcaatacgctcaccctctggagatccttatggaatatcgtttatcgctaggaaaggaaatacaagctggaggcaaggccccggcgagatttatcaccctgggtgtgtaggcgggcggagactccggtgagaattgtcaccccttctcgcccacactcaccgtaagtcaaattccccgcccactttagtgtctaaggtacctcaagaattggccgcgtaaattatggaaatgaaaataaataaagaaaggaaaaaacatacaacagcatgtttaaggtgatggtcacctaacgcccacggatcgggcatgggcggctccccgctctattcagggcactccgggctgatattcagcttgtatagcgaaatgtaacttccgaatccatatgattcagtcgaacctcgatggcactagaaagtatcgtctccgcctcggtataattgccctatttcctatgcgtaacgtgcagcgctttcaagtagtgtttcccaagtcttcagtgaatcctatccaaagggaggtctgtccgttacaaactcagcatgcggaaaaagcaacttgcatttatcccagctactatcaacccctttagggaaatgcacacagatgttcaattgaccttcttttgtgttcaacacatatatcaccttataacctacatatcatttagacacggatgtacacttgggcttcaagacttaaactgcagccacataggccattccttggcagtagaaaaaaataaaaacatacaacagtgaggattcgctggtggtcacccacccaactactaactcaccggcgnnnnnnnnnnnnnnnnnnnnnnnnnnnnnnnnnnnnnnnnnnnnnnnnnnnnnnnnnnnnnnnnnnnnnnnnnnnnnnnnnnnnnnnnnnnnnnnnnnnnnnnnnnnnnnnnnnnnnnnnnnnnnnnnnnnnnnnnnnnnnnnnnnnnnnnnnnnnnnnnnnnnnnnnnnnnnnnnnnnnnnnnnnnnnnnnnnnnnnnnnnnnnnnnnnnnnnnnnnnnnnnnnnnnnnnnnnnnnnnnnnnnnnnnnnnnnnnnnnnnnnnnnnnnnnnnnnnnnnnnnnnnnnnnnnnnnnnnnnnnnnnnnnnnnnnnnnnnnnnnnnnnnnnnnnnnnnnnnnnnnnnnnnnnnnnncttaagtacggctgagcggacgggaagccctgttttccacaccctatggtcgtatgtatgagatggtgaaggaaagagaatcatcaagtagttattaaatgcagagtaggaaccaaatcgcatgaaattgagtcaaactacacaatgcgtatgagaattcgctcgttgacattatcacttctgcttttccacaatctcttggtagcgatattcacagtagtaaggtcaatcccattttgagtagcgaggtcacgatctacgatagatcgctatcattatgtgcttcatgtttgcttgcttgctcgtttgttcactcgcttattgtttgcatagtctgctagtttgcatttcatagattgttttctagatagctaagcgagaaggttcgaggtttgcaacgtttgcaaagtggtcaactatatcaataggctgcttccaactttgtaacttgcttcttctttctctcctcatcttagttattttgaattgaatgccctcttcggttgcaagacctggcacgttacagcgagcacgaattcaatcaacgattgttgcggaaaatcaacgaataaagcaagaatcgctgggtaaacatctgatattcaagtatccagcttatctatgtgttcatatttaagcgctccgcttcccattttaataaaatttcagaattatacacagttggtatgatggttcaggctgagtgtttgcttttgcctggttaagcaatctcgtattagtttaaggcttcagtatcgtgagctgaagatttccgggtgaaagcgagactcgccatactagccagcgtgtcgggatggtcctcgccgagctttgtcttgcatgtctctattatctgcacctgcagctgctcggcattcgccccctaaccttcattacagtaaataattcctagtgttttccagatgaaagccttccctgtttccttggtgctaatacccctcaaatctatattcacacgtctgggagatgcaacatagagatgccgacgaagctgtggcttatggtcttctttgataagttgagagcatgcagcaagcataaacttgatgtaccacccctgccatttttgattttggtcgccacaggttaccctccactgaacctagctgtgcattgtggtaccgggccactttccttgcactcgctgtactagactgtagtgagccaggacatctatgctttcattatacctgaagtgcgactgccccccaagcctcgcacgactacttcatacgggatgtctctctcttcgtgtcgtattgttggttttctttccagatcattccatagctggtctcgttgtgtatagcttggcactgtctctgtcgggacgaaatagatgtgcgttggttttgtttgcgttgctaatcaagacatctgtcagctggtgttagaatccaattaaagcagatgatgggctgaccaatttttctttcgctctcggctttgagccatcttttgatatatctcaccacatcttcatacgtttcatcatttagagactggcatccctgaatctccctatgtaatctctctgctgaacgttttattgtcccttgaatcactgctgattcccggtccaccacctggattgttatataagttgcatatcgcatatgcgggggatttgaaagctcacatgggtgattgctatgccccatagaaattctctctgagcttcaaaaacgcaaagagtcttgcgagacatatccttttcgtagataaaagagtgaattcgatcgtataagtcgtcactagcatctgagccaactttcataactttcaaaagagcggtatctgaacccctccagtatccaaaaagagaaattatctctccaataggagtgagttttgaacctcgatgcggcgtgctcaaaaagacaaatcctcccagactctcgagaatttcaggttccaaatcgctattttgcaccatgttcaccacagcctgtttccctattagttcaactgaaaataacccgatgctgaaccaaccttacctggtcgatgattaaaccaccaaaactatagccaatcaaaatgataggtcggcttttctcctagacgaattaagtacctagattcaaatcgaaatcaagtccaatctcttacctctagggtctctcgcttactggcgagagcgtgaatcaagtcatcgcccaaatcttttaacgacttgctcagggcattgctcatccatctcgtatcgtaattaaaggccatgatgcgacagttcaaattttctttcggtaacagatcacgaacccatgacaccttttcagatgagcgttctgtagttgtcagtggattcgaatcaagaccgtgaacgtagacgatactgacaagacaattagccatcaacccatgaagagaccacaatttacgggcacaaactcggcaagaaaggtatctcgggaggtcacgtcggagggggaaaagattgtgatgcgctctcgcttcatacacacagagcctcggaaaagaacaacctgcaaaggggatagagcagcacatatcaaaaaattgaacatggtcaatagtatttttggaattgaatagttaggaagtgagaagatgtcactaatcagccatgaaagagtaaagagggaaaaactccacactcgatggaaaagcctttccgataggaacatagcccataaaaggtatgggatggtgattgtaaacagcatattgccaatacacagttaaccaaatgtaagttgaaaatatcacgatgaattatttgaaagagaagcagggggtggatagggaatgggagctggacacgaatttggcccctcagccaaaaaccgagtcgtcagggtgatatgccaccctaacgcatgatggcggggcccagatgaattatctcgaatcaagcagatgcattgctatcctacgtctgggttactgttaccattaccgccctagaggggccaggtggagtctactgattgcgagtcggacgtggtccgtatcaaccgtcttcatataaccgccatcgggattcatcacgtcgagattcgaggttgctctctagtctatatatagcacatgcgttagccccattaattgtgaggggtgcgatcatccgcgtctcagcttgcaatatttcttcatacacgaagcgttacccctcatcggcgaagatgttctcgctattctctcctcaggtctttccagcatggctccgttctccgagaactcacaactctgtgacaagctcacaataaccgccgatggccacttgtcgaggcgaaagagcaatcccatttcttcaactcaacaattgacagagaaggatcatcttcctggcgagccaaggataaaattggaggatgaccatattgtcaaaactctccagtccgagttcatgacgcgtaacctggacaaactttcgccattcctttggctggtcgccaaacaagatagtactcatatatcagccctcacccaccaaatcgtgagaggacgtgaagtgattatcacggaagatccgggcctccatctggtctggatctacgatcgagtcttcatcaagccaatgcccaagtatctcttatcgcacgcattttggcagttttacctcgccgacagaaattcaaagatcccaaagtatcagcaacacaagatcgctaaggcagttctcggattcatgcgctcgtatgcctatcttatacgccataaatcggacttcattcttgccaccaatgataatcaccgactactaccgaaaaaaatcacatattcatctttcgtcaagttcattactgcatttgaggagatatgtgacgattctgtgtctccacgctacaaatttggcgaactgcgtctttcccgtctgaacttttggaccaagattttcctcggacgtctcatgtatcacaaggtgcatgggcagtatggagcgtattttgcacgttcctacggcaccttactgttcatctttgcagtcttcagtgttttactcagtgctatgcaagtggcattagcggttgttccacttgaaggtggatggtcagtgtttgcatatacgtctcgtggatttgcgatattcacgattatctgtgtggctttgattataatatctcttctctcggtttttattgttctttcttcgcgagagattctttatgccgtgaatgatctcatcttgaagcggagaacgaagaaagttggcaatagtgtgtgaaagaaatgccgctatgatcctttcgagctacatgtaatcttctagactttcgtacagtacgcatctgactcatataattgaaggaggagcatgtcctcggttctaagatcatgtgactctgcggcacgagggcaggagttacattggacagtccacgccgagcattctgttggccctgtatggggtgcgggcgactaagtggatggcggcttcgggatggtgcgttgcccgtactcgtgatctatgtccgccgggaatgggaatatcttgagccaaagctggcagggaagtatatgtgatgttccgcttatctgagacttcatggatcagtacgctgacaagtatgatcttggttaaatgtgacttaaaatcaaaatactccaaatctaatcgcgaaaatgagaataattgtacaattgcatggactggcaagcaaatatcaaacaggaactgccatgcctgggcctttcttctcagcggtattcttaacaggatgaagtagcatagatggaaaacagagtggtccgtataaatcctctcgctagaacaagaccgagtcagctttaatgacgttatcttctcgaatgttcggggaagagaatgatactaaccaagtcaccgccatcgaaccaatttcgaccctgtggatcctggtgctgaagtgaagtgatattagttctgcaaaaaggcaaggcaggggggtaattctcacataactaccgtcggtaaattgattggggtcaatcgggtagcccagccatcgccggtaaaggtcttctgaggtctgggtagagaacatataagataatcgatagaggatgtggtcccagcggtggtcccagttccaaatactatcgcttcccccgttgattttctggggttcacctgggtttaagatgcgtccaagttctttggctgtccatttgccatcaatgtacacaggatgcggtacatggacggctttgaggccatgccagagggcaagtgaaggagctgtcatttcggaaacaagtcccattccttggatttgcagatcatgcatttgttgcaccaggatctttgatatgcgccccattgcaacgggagatgctcggcgtggagtattctcggacacaccccatagtctgttcgagaacgtccactttgtatctacggggtcgaagatcggtaagaaggagataaaatctgcttcttccccgacaccccattcgtacttatcgtcctccggagacggcgtagttggcttggggcctactggcgttgtatctgaggtgccctggggcccccaaacactgcctcggccattcacagaggagccgaccatccgtacaaagtcctgccagctcccgtgtatccctggaaggtagaaataggcgttgcgctcccagagatatttccgcggttgtctctttgcaaattccacggacttttcaaggaaatgatagctgtgccccataaatctggcatccatttccagttgccagtagtattcaaactcctgaaacgattgcgaaaatatctgaaccggttgccaatactggtaattggtgctgtgaatctgttagacgacatgcaatatagtgatcagcctcggaggtatcgaacctgtgttcatcgactttagggtaccaagttttcaaggtctcatcgttaaaaagtatggtcacgtccaaaaactcgcgtggcacaaagcgagacttaacagattgcatagcctcatcatcgtctgtatagggaatgtccttgtctttaacatgacacaagatgaagacctcatactcaccgccggagtgtaacgacagttccatgataagagatcgcacacattgtttgaggttctcagtccaatctatatcatgccacgcacgtagtatgacagccgatcttgatttgtgtttcaagtcgcgagtagcagagctcggtcgatcgcggaggaacttccttgaagaaagaggagggtggagaggaagaatagatttgatcgaatgagagtcagtctgcctcgtcgagtatcttgcggcattcctttcaacgcattgtaactgcagtgctccccaattggcttcactcaaatttatgtgtggttggggatcgtcactgtaaccatacgcgcccaatcgagagaagcggttggcacaagtatatgcatcaatacctattgccgcatacgatccgagtaagggcaagggaaaatctatcttatctgtcaaagttgtctcgccattgagggtgggttcgcaaatacctcgaggaattcctggataaacggagaccatatcttggatattcgaacgactcaatggccttcctcgtgggccgtcacaagcaaaaaaactgccgagaaactccttgcgccactggtcgctgttatagtcgggataagggtcatagactacaggccttgggggttcaggatcatcacttccatgtcctattgtcaaagtcccgccgcgataaaagttgccctccctatcaatcacgcgttaatatatacacaaattgggagtcagatggaccgccacataccggacatcacgtagagttccaagtccgatcggctcatgggcaaatggcgtttgatcatcttgtgggcgtacttcccgcgacccgctgcttactagatctccaggccgtatcacagtagacctggattgccctaggtcaggccatgagccagaaggaaagtactgcagatattcttgccttcgattcaagacacttccgaaaatgaacaataatagtatggccaacagagcaagatataatcctcgtgaataacgaaaaatattcaataatggagatagattaatgttggatcgtctcatcttcaaaagagatgccatttagccagactgcgatcgatatctgggtgaacaaaggaagttggtgaaaggacttgacaaagagagaatgagcaaagacaatgtccgcgatagcgccctattaaccatgcaagaccccgctagtgagtgccacttttccaggatccagggtcatcggcgtatcgcctgaaagcatcctagcaagcccggcttcaacgctaataagtctctgctggtctatattgtatttcgtcattcgataccaggacacacgatgcaaaaaccccttttcagggtcatgtcgggctggggaccaaaccgatgtcgcatagtgggtcgggtgagatcgctcgtgctagacgatgtacggaggagtaccagtgggctgtgtccagcgggccgctcggagcgaacagacccgtgtatattgggctaggctccacctattgcctcatgtctacagtgtatgtgttacctactctctatctcgttccctcatctgccgctgctgacatcgttccagatactattgactcgttggcacccatcatcccctattaccgcatgtactaacgattaccgtaacatgacagggacagggaatgacaaaagtacagcacggggccaatactacgcagtagcgtgcagtggcctgatagggttactgagagacacgggattccgttgctccactcagggcggctagatacatattatttcccaatgctcccttccgactgtagcgccaccaattcgccttctccccagctgaaacgaaatgtatattttgtatgctgatctgctagatacttctgatggatacattactactgcaggctttgtctgacctctgtcatatatgtatagttataaaatctactccatcaaggctggtagtctagatttgaggttgaagatgagcatgtaaatggaatgataattgggggcggcttcaagatgttttatcgtaattttaaattgacaggggtttgagggctctcaacccgggctggaagcgctgatcagttgaaggatgttgctcagtactgcgcaaagataaaacatatgctaaggccactttgttttccttgcgattctctgcttctgatatccttcagccccgatatagcccgggttttgaaagcggatttgaaagagccgctctttctttctattgaagcagcattcatacatcacttacactgacatggaatcctacttccgtctcaagggcctcgtccttcaactgtcgcttttgagtctctttactgcagtcttcgccgtcgaccaatgctattatccaaatggagcgacaagcacagataccccgtgttacaccgatggagatttctctcactgttgcgcaaacacgtctatatgtcttaccaacggcttatgcttatcaatgaagcaacctttctcgctgtctcgtggtggttgtaccgatagtacttggagaagcagccgatgtacagatatatgtggtaggtctgacattcatctaacataatctatatcctttatctgactcctgttatcagtcaaggcccaaggaggtgccggctcagctgttgtatggctcgacgggagtgaaaataacgcgacctattgttgcaactcagtccttgttgatccgttttctggggaaaagatttgtagcaacgtcgatggtgcaactcaaaccagttttaagatcctcgacggatacattattcccagtgccggggttctctcaaactttgaggaaatatccaacaatacatcttccttcgttgccaatggtaccgatacggctgtcactacggctgtcactacggctgccactacccctgtccctaccgctaccgctaccgctactgccagcaacgaaaacagctgcaatgagtctagggaaattgcaatcggtgcaggagttggggttcctctcgcagctattgctctcctatccattggatgggccttttgggagagaaggaatcgaaaattagcagcccttccggcagcccaacctactcctctatttcagccatcttaccaagtggcccgtggccacgagagctaccatgcatatgagttgaaaggatctccaccgaagcctgcggagctctacactgcctagccccgtgagtaggctatgacatgtgataagcaggtttattatggcttagtatttatgtgtgattgggctgtgggaagagagatactttagtgaagacttgattagagcattctataattatggagatataaatgagaataacagggaattgacactgtgactagagaggtgaatgaagatggtcttttgagtggtccttctagatgtccttcttacacatacagcgtataacctttgatgatatagttctatggttgagtcgttcctattcttaccgcagctatgattacgcgagaggaatgtttagaatataacactattcctatgagtatagattcaagatatattcatctttcttggaagctgatatatatgtctgggacataggtcatggctatcacgattttcggaagaatgcaagctcaagtcctcgaagctcattcgagccagcaagggccagtcgtcaggaagacccaacttcttgatttctcgacaaaccaagtcgccaacaagagcatggacattctgcttgtatttatggctggtgacatattcggagatcctaaaggactcaggaactattagaaatacatagtgaaatctgacagaaatacagttctaccgcataagtttccgcggaaatttctctataccgcctttgcgcaattacatccactatcttcaatgattgaacattgcttctaaagaatgatatataaaatattaaaacttacattcaatacgtaggctatttagctattacgatcatatttttatatatttttctcattagagatggatgtctagttaatgttttaagtatgtggattgaaatatatattttgacgattgggctggttcgcggaaacttttgcggttcgactgtatgcagtacgaaaaagtatgatgtaatttaacagatatgtaaagtctctacggagtactagctaggaaatgtcgaactgaacatgcacgtttctgtgggattggtcatcccgtttcatcccggatgagctgggcttttcacctggtctcatcctcgaatttcactatggatccacctcagtgttcgacaaaatcaaataaaagcccgatcatttgatttaatacggaagtgaagtataatatacaggaatatattatgcgtgatctaggaaggcctcgagtatcattattcgaataaagttgcagataccctttgaacagggaagcatataagaaattaaaccaatgatataagaccgaagacctcaattgcctatgtttttgtctctcgtctccagaaaacggttgcatggtcataggcactgccaaaagcacttctgtgtcgacccaaccgaacgtaatcaagcctcaaccgtgaaaggccacatcgctttcgcatcctccgcagatttctccccagaaaccttctcgatgtacaggtccagtagctccccattctgccttcttttctcgtctatatccaacggcggcgcaatccacccctccgcatcagtatcaagacattcctcagcaagcgcttgaacgtcatgccaggctcggtattccgcaaactgacgtccatgtgcatcgagctcgtcccggctgaatgaataagggcattttcctgaaaatccaagacttgaccaattctgtaaaatctctatcaagcattcgcggagcgggacaatgcccacttcggagatttctccgcatcgggtgaatagttctcggaagacacggggtacgttcatggcattatgcgctgctctgtcttcgagataggtcgagacctcgtaagcctttgctagttttacctgtgaccattcgcggaatgcaatggctttgctgtccttgtctagttcgttgaaattatcagggagttgcggttggaatattcccttgacataatcgtaagtctgcggaggcttcagaaatatcggccattgcgcctggagaaatgcggggagtatagacgttgactgaagatcgataagggatactattcttgaacattcgtctggggcgacaaagatatttcccatatgaagatcggtgtgccatagggtaggctgacaagctcccgttaatatttggttcgagtctaaaagcttcatgaggttcgctgtgacttccaagagctgggtttgttgttcaacggttcctttgtaaaagctcgatcggctttgttggcctcttgatattcgaagcaattcacgccgtgtaatggatattcccaagcttgaaattgaatcccctgtgaaatgttagtaggtgaactgccaggttgtataggtaacgcacagggtccttggtcaaattctagagtagtatcaggattaaacttcttatcgcaagaaggtccaatgcagaaagacttggatggatcgatttcatcaccgagagacctgttcggtcggctcatgtcagtccggaggtatagtcctccgtaagcagggaacgagatagccgacagctgagcctcaagcttggtcaagttcttgatcagctgtagcctttcgaattcagtcatactcctccatcgttcatatagaggaaccccggcagctttctccataactatatattcggcgccaacggcattcgaactatccgacgaccaggaaagaacacgagggacaggaatgctagtgtgtctcccgactgtacgtcttagccactcgactctctctggaataggaaccatcataccgtattctaaaactcctacttcaccagccgttgtcaatgaaggcggaccagcaatgcggcatggaattttggctataacttccgttccatttgctttcctcatcaaaaaagccttgctaaaccccccttccatcttctcaattgctgtgaccggactggaatccccggccgtggccacggtattgcaaagcgcatccacattgaaccggacatatcgtcggctgagctgatgttcttcatcgaccaggaaatgactattggtgtaagcgaaaaggtcctcacggagaattggtatgcctggaacatcagcaacggtctccagcacggacttcctcgcttacctcggcaggttatcgacaggggcccccctggccggccatgtcgcttcaacacatttctgagaattgacagcatttcgcatatctacgggcttgaaggaagagtgcgaataaaatgaagacgggatattgcttcttgacggaatgggcggcatatcattcttccatgttgtcgacgactctccctacttgtcaacaaatcaatctgttttgtttcgagtgccaatgccaatttcaaagttccataattcagtgaaataattgtagtagctaataatatgtatcgacttgaagtgctaggttatgctatacaaacacaatgtcggttcaacatataaacagaacacgaaatgtaacagcccaatgtatatgccggagcaattcaaaatataccaagcttagaccaaaagccaagctaccaacctaattcgacttgtccgaaaatgaaaccagagcatgataagactcagtcaaaggccacaacccctgagcaaaaccaagcgctccagcaacaagaagtacataataagccaccgtccacccaacacccaagccactgttaccccttaccccaacttggatactatcatcagaatcctctttaccccgagtaatagggggactgatatattcacccgcctggacccgtccccagaaccgcggcaatccacaccagttacagaaactatggatgagaaccacggccagcaacgagccggtccgcaaatagacaaaggtcgcataccagccaaaaatagtcgtgtagccaaactggaagagcgaccgcagcagggcggccagagccggggtgtccggatgggtcagacagaactcgtaaaagtggtgcacgtgcgcaatgccgaaatacagcggtgccaggaacacgatccggcccggcgaggtgtgtgcgagtaaatgcagcggtaccatggcggatcgaaacatgacttcttctgtgaaggggccctaaaagatattagattgaaatgttgttaaaataagggagggaagaaaagatggaaaacgaaaagcaattgcataccgcgacataatttctccagccaatccagccaccgagactctcagagagcttactacgacggaaccagaacttccattcgccctccacaatgccacgttcgaagagcgggccgaggaacagaaccgcggtgaggaaaagactccgaagggtctccagcaggccgacgggccaccagccgaggagtctgacaccggcgccgagagaggaattatcctcgatgatgagccagaggacgaggacggagctcacgatacaggatcccgtgacggcgcgaatgcgggcgcgaatcacggacggggcatcgcgactgagatttggcgatgggcgggttgttgatgagagatagaatggtaacacgtagagtagtgtgaggaggacctgatgggagttagatacgagattgtgaattgtggttttttttcttttcgtgttcatcgtgttcttgttgtttctaggagttctacatacagagagaaaagcaacggtatgttctgacagggcaggttcatctggattgttagtcgagactcttttttttaggattcccccttgactcaccctgcttcgagtacagactcctcagtcgagccattatccctaccggcgccatgatctgcagagttggggaggttgctatttatggggatggatgagagaggagggagtgctttgttggtgttaccgtacggggagaggaacggtgattggctggaaataatacaatacagtaatgtactgtcaccatgcaccgtggacgtgatcatggttgttcctattgttcttttgatatcgacagtccgacgttcatattccggtatatatagtcgatctatacatagcattgaccagaatctcggtttcaggctagacgaacaccgccggtttcaagccaaacctgattcgaactggtggaccgtgcaaaaacaggatgtgagctctcacccctggaattgtctgagtcaatgcgagggatcgtggacagttattctccgattacacgagggagacatttattggcaatgagcgtctgattattgttctcggcctgcattctgcctgtcagacctggaccgacgcatagatggagtagactagtggcagttcattggcagttcatcaggatcagggacaacgcacaccggctccacttcgattctgcgattaaatgagacgagatgtttcaaggagtcagtttgtgaatggctactccgcattcaatatggatttatatatttaaacggtagcccagggagtatgagatgtaaatatcaacagacagaacggacaccagaacagacaccagaacagaacatcccaattgcaaccagtccaaccagaagaaacaaaccaattgcaacttgtacttttgatctcatccaatcgttaatagccaccagactgtcaattcaagtgcatgcagcctgcataacccctgcagtctaagatctcacttgcctagacgctcaccgctggggcaacaaaattcctcccttccaagtgtctcacgttcttcttcgacttcgtgtgcgcctctgcttttctgtcctttttgttttgaaacgttttaatgattgtttttcgaccactctctttaatggccttggatgtttgaaacgacctaattgacgacttctgcacgtctgcccacactcttttgatgaacatcagcctatagaaccaccctggatatccaagggtaccacattccttacatcggatactcgactcggaaaaacaacaacactcttttgacttgtttacacatctggtttgccaattgccctttgccgtcgactttactcaatcagtcttttcaatcaatgctctcagtgtgtccgaataatgtcttttcccgctcgctcaacctcgccccgcgcgcgaaggccattgcacgagcgtacgccctcgcactccaatgaaagatcaccaacccgctcattacgcatcgtcccggatgaagaacttgatatgtacaccgcaaccccatttccgaccaagccggagcagattctcttgccgcttcccgggaaaggccaacaacaatacatatcagacaccggtttcagctactccgatcaccacctgggatcatccacgtcgacctattcctcaccggctttcagccacccggcaccccacagcccgcgagatcactcaattggtagctgggatgtatcctccaccgtggataccggcaactcgcccccgcagttgtgggatgacgacccatcctccagcaagtcgtcgctgccaggctcggggaaagcaccagactatgggtccgagagttcagaagcggacttctcagatgatgatatgggattgccgacgaccaccccaacgataaaagccgtacgctcggagtcaactatgtcgccaaaatcttctgccgagtccgtgactggctactccagccctatagttgaacaaatcggggccccgtcaagtcccaactttgtaatgctggataactcgagcatgaacttccattcagagtcggacccgcgcacaaactcgctctcgtcgtataactcaggaggaaccgtggttcggcacgtggggtctgcaccctggttccaaaacgccttccaaccggcctcgtccgagcaatcgagctatggatccccgtcattccactccagcccacccgcgcagtctatagcctcattccactcgagtccgatcgcgcaatccattgcctcgttccgctcgtcatccagggcgccgtcgggcagccgttcccaatcagcaacatcctcttcgcgcagtctccgttccgcttctgacttgcaggctgccatcgacaatggcgtacccattcaatacccgcgtattcgcgcgccatcttcaagctcccgcaccggtgcatcgtcagaacgcgacttcacccctggccctccatccggacgttgcaatccccacttggcatcaggacgctggaacccgcacctctcaactgtctcatccatctggtccgccgatgaatcaaccaagctcgctggagaagcagacacggactcagaccgcgatatggcagcgccaaccccaccaccaccagcagccctagcgacagaaacaaccagatcctccgtctggcttgtcgacccctccaacgacagcgaagacgaacgtctcgacagcctaaccaagctcccaaaccgcccggtcttctcccaaagccaaagtctctcctccggctcaaaacgaagcgacagcacccgcagcctccaacgcccaggcacaggatcaagcacaatcctcaacatcctcccaacctgggcaaaagtctactacctccgcgaaccaatgggcctaaactcaactctctcaatgatggacgcctcccgtccgccatccatccgtccaccatcaacccgcccaccatccactcgcccaccctcctctcgtcccggaacctcaaactcaagcatcttcaacctcgtcccgggtcccctcaacgtcccacgtccccgctccccagaccgtcccctccccgatgccccgcgaagccaagaaatcacccaacgccgcgtagacagcgacccgcgcgatccacgcgcccactgggtcccgtccccgcaacccgaagacggcgagttcaccagcagccacctctaccgcctccgccacagctggtccccgcatctcgtccccgaccgacgtgtcgtccagcactcgacgagtcggtggcggccgccctccctcgactcgcgctacgagcctgtcctcggccggcgaaatatccaggtctactcattctgcctggggttcattttcccgccggcgtggtgtgtggctgcgtttctgcctctgccgcctaagccgaaggccgcgcagatggtcgagtttcactctccggatgtggggatggcgcttgaggctcagaatgtgaatctgcagcagcggaggagggataatgcgcgctggtggaggaatcttaatcggtggatgatttcgctcggggttgctatacttgttattattattgtgcttgctgttattgggactaccacgggtttttagggctatttgttccccggattggactgaactgcgttttattgcggtctttttatttacgctcttacgacttggactttcaacactggtgattacttgatgctttttttctcttctttttcttcgcggttgagctcccggacagccagtcgactggtttcttttccccttgctgttcgctatattgcagacgtcttctccttgctgtgatctcttcttgattattgacgattcagccccttcttacgttcttcttttcgcttctctgtctgcacatttgttctgaacgactccacgacttcaacgcacataaatatccttctgttttacattctctcgacgtttcaacatttgcctcggatctgtctacggctttatatgtttgttgggattctatgcatggtgacagcctttgtttacatttatgctatacgtccgtgtattggatatatgtttttgttattgtgcttttcacttcttctcttcggcattctatgtatcacaatttacttatgctatactcaacttcttcattactctttgaaagtaattgaaatcaaatcaaagctcgcaattctctaaaacccatccaatccttggaatatctatagactgatctcgaccaaccatcgctattaaacataataaagacgaaacactcctactgttctataaaaaaagagtacaccgaaacgctgatccagaccggctattcaccccgcttctaatagtcacctctcactgttagatctcaaccaaaactgctacagcctacaacttccgcccaagcttttgctcaacggcagccttcagctccgcgcctgtaggcatcttaaccgtacttccacgtctaccacgggactcgatctcagccttgatctcagcaacagcctcgtcaaagtcacgctcgggatcattcggcaggcctaggtcaggtggaagcacggtgtcggtgcttacggcgttaggacggctgcggtgcttcagttgagagacgaggtattttctgagcggggagaaggaggcgaaggcaactagggaaacggcgcagttaaggatgccgtagaagtagaggcgggaccagacggtgacggagtcgtcgaagttgaggatgataaaggggatgacggcgaaggaaagggtcagctgtgttgccagccagctgaggatgtcgtagtagggcttgtttggtgttggcttggtgccgtccggtgtgaggaagaaggggcgcacgtagcggcggaagtctattgaatggtaagttatggagggagtggattatggaggtgtattggtgcttactctttgccgcggtctggataaacgagcccagtataaaggtcatgtagtatcctgggtggaaaccgtgccagagggcgctggtggcgaaggtagccaggctagcgcggaagcccggtttcttgcccttcggcgtaacgcggaggtagacgtagttgcgcagccagtggttggtgttcttgttccagttggctaggtaagcatgggaattctgtgccgtttccatcgcccacggatcgacattctgcagtcgattccagaagaccttgcctgttttcgggtcgaagctgttgtatcccatgccggatagaatacaggcaccctcagtcagagcccagacgccgtaatacttggtgcgagcggtgaaacccagcatgaagacagtgaaaacgcgacgcaggaaggaatactgcaagaaggcgtctgaaagcacaaagtcggtggtgaagtatgagctcagttggatgaaggcgaagatccagaccaacccggcggcggccttcagtgcagcaggtcttccgctgcgagggatcttacgcttcttccgggtagctggcaccttggatgggtcagtgcctggcggaacttcaaagagcgtagtgtcgatccaacggcgataatccacgtattcaaaggaaggaccggcaaagagagaagggaagaacaagacatagcccagatagtctacaatacccgggaatttcgtaatagcagagtacttctgcgaatccgagagttggtccttgggcagacggccgtcatgaatgttccagcagaatgagctaagtttcatgaccatgaccatctgcgctccagtaatgtcaacggccgatttgtcgttcgccctctgacgatcgatatggttaatcgacatgtggcccatcaggaaaaggaacccaatccacggcatcagtgatccatccacgtagtaggcgattgcataggtagccgcggcactgtatagtaaggtgcgtagaccatcccagaggtcgaagagtccgataatatagaacaacgaaacggcgataatgaagacattcttcttccagggttggccatcggggatacgtttgaggagggcggccagtgggtaggagaggaggaacgagccgatcagcttgactggagctgggggtcagcaattgctagcaattcgggagcttatggaaatggaagatcgtacgctcatcagttgatgcgccagtgagtttagctggcacctcaaatactgcggggagaagtgttagttagaccgagcttcccaagtttgaatgagggttgacatactctgatctacatagggcaacattgttgaccatgtagaagatgaaagaacagacaaaacagacaaaaaagaaagaagaagtcaaaaagaagatcagagcagtgaagaaaggaagaagaagccaaaaagaaggaaaagaaaacagctcgtcatgtggaaagtggaattccccccaacaagtttccgccctctccacattcagcccctcgatcttcaacagcttgaacagcctcaatcaggagctaatagccactttgaaaaaacttatttcctggtgaaatctccccaccatggacgtcgtcgcggctgcctcggggtacatctccaagatggtcaccgtgggtgagtccggaacctcgtcatccaagatgaagatcttgcttctggatagtgagacagtgggtggatttaccctggcaatatactgatctgattgctaacctaacccctatgggtataggtccctattgtttcgaccgcaatcacccaatccgcccttctaaaccacgaggtctacctcattgaccgcttggacaatgccgcgcgcgagaagatgcgacatctacgatgcctatgcttcgtacgcccatcacccacctctattcaatttttgatcgacgagctgcgagaacctaaatacggcgaatattatatctaccttagcaacatcatccgcaaatccgccctggagcggctggcagaagcggacagtcacgaggtcgtccagtcggtccaggaacagtttgccgacttcctcgttatcaacccggacctttgctctttgggcttaggtttcccattgcaacggatatggagccattcgccggatttatggaacccagattcgttacaaagagctaccgagggggtcctggccctgctcctcgcgttgaagaagaatccgcttattcgctatgagaagaacagcctactggcccggaaattggctacggaggtccgataccacatcacgcaggaggagcagctatttaacttccgccggaccgatacacctcctatcctgcttgttcttgaccgccgcgatgatcctatcaccccgttgctgactcagtggacatatcaggccatggtacatgagatgcttggcatcaacaacggccgggtggatctgcacgatgtgccagatatccgaccggaactgaaagagattgtcttggctcaggaccaggaccccttcttcaagaagaatatgtatcagaactttggtgatctgggccagaacattaaagaatatgtggagcagtaccaaaccaaaactcaaagcaccgcgaatatcgagtccattgcggacatgaagcgttttgtggaggattatcccgaattccgcaagctggcaggtaatgtgagcaagcacgttaccctggtgggtgaactcagtcggcgcgtcggtgaagataccctcctcgatgtgagcgagttggagcagagcctggcatgcaatgataaccactccaatgatcttagggtatgttcaatagttaaactgattatgctttgctcacggactcacccttcttctccagtcactacaacgaatcatcgggcagcctaatgtgccctcagataataagttgcgcctggtggctctctatgcccttcgctatgagaagcaacccaacaacgcgctaccaattctccttgatctcctcgccacagcgggcgaagtctcaccaaaccgcgtaaatattatccccaagctcctcacctatcaccactccctccaagccccaccagtcgcaggcgggttctctgacctcttcgaatcaacctccttcttctccggcgcaagcaaccggttcaagggtcttaaaggcgtcgagaacgtctacacacaacactcccccagactagaagtgactctacaaaacctcatcaaaggccgcctgaaagaactgcaataccctttcctcgagggcagtggacacacgcgggacaaaccgcaagacatcatcatctttatggttggtggcaccacgtacgaggaggcgaagatggtagcgcaagtcaatgccagttccccgggtgtgcgagtcgttcttggtggtacttctattcataacagtacaaccttcatggaagaggttgatgatgcagtgggcagctggccagaaccaggaccttcgacagctgcgggacggctgcgacgggaggttggacgataattgtgttttatttctggtgtatatgggtaatgggatagaagtatatcaagtaaagcctgcaatgacagtcaatttcatcaaatctagaaaaggaaatagttaacggcaacttatttcggatttgtcgctataccgcgccgtagggacagaaaccccaaatgcggagattcatcttcctctttctcccctcacctgagccacaccatggagcagacatccccaaaaggaggtccctcctctccagcatcacgcgaaccaagacttcatctcccttcaacaaccgatcccccgggtccccagaaccccgccaaaccgctcgtatggctggtatacaacccctccctaagcaaaaaccccaagaaacactaacacacccccagatcttcggcgcaaccggccacatgggccgctccctagtaaaaaccgccctcgccaacaatgacctagtagcagccgtcggacgcacctacgagaacagccccgcagcaatgaaagagctagaatcagccaactgcatcggactcctatgcgacgtacgagcgcgagagaccgtcaagcgcgtaattgaccaaacaataacccgcttcggccgaattgacataatcgcaaactgctccggctacggcgtcatcggcgcctgcgaagaccaagatgaattcgacatccgcaaccagttcgaaacaaacttcacaggaaccctgaacatgatccagctctcgctaccgcatttccgtcagcgtcgcgcggggagatacctcattttcagctcgacgtctggcgcgctcggtgtgccgggcctcggaccatactgtgcatccaaatacgccgtcgagggcttgatggagagtatgctgtatgaggtggatagttttaatattaagggtacgctcgttgagcctggtcatatgcgtcgtgatgatattggggatttggtttcgccatctgcggtcgtgcctaacccttctgaacatcagctttcgtcgcccttgccgctctacggccattttctggttaagccgcccagtgagccgtataatacggttacgtcgccggcggcgcatgcgcgacgtatgctcatgtggctgggcgataagcagcctgctagtgcggtaaaggcggcgcatttggtttggcagcttggtcattgctcttacccgcctctgaggctgattctgggtacgtatgctgttgagagtatacgggatcggttgaagtgtattattgaggagattgaggattggaaatatctcagtttcccgatgggtgagactttgccggttggagggcgtgggggatcttcttttccggagggagctgaaggggggagcgaattgggtaatggataattttgttcgactttgtcaacgtcttctattatacccaaccctgatcaaggagcctcttcggaggacagccgacctgcattctccggcgtggggtttcctatgtcgtgggaatgcatgacccgctacagagcttgtctggattctatcagaacaagagacttgctatatacctacggatgtcgaggattaaggagcaaatgatatgcgtctacgtatactgcatggatgctgcacaccacgaaaaagtgctgctttcttggtaaacccaaacctatagctccagaattgctctctgcttcggccaacgttactagcgcggaggcagacaaccaggctaatgggaaagaaacccaaaggcattcactccactaaacagactcttcgcggggagccagtcggtgatttcttgaatttctgagatttcaccggctcgtgcaaatgaaccaccagggcgagtaggcggatactggcggttgatgcgaggagagtcactctagcaaattcatatagatatcgtgtatccagtaaaccatctcggccagcgcagtatcccgagctaggacggcctcatttgcgagttacggtccaagtagttgcaaactagcataatcctgaattgaggtcgttatgatcggctcagacaggcttgtaattatatctctcaaggctggaaggatcattctagagtgtgcattgggaatttccttcctggtcgatgcacggaggactcgaatgtggtactcttgtggataatgtgaaagaagtaatctgttgatgttagagtggctcttatgaaccatggcctgcgaaggagctagtactttgccattttggtggctttcagaaccactccatgagcacggcgctcataacctctcggttctaggaggctcatgggttgtgttcatatataatagtgatgacatcgtctaggaaatcctcttcttataaagtctaaacctttgtaggaataatgatggtaagagaaatatatgaagagggaaaagaggaagatgccatttatagccatttatagccacacaaggcatgatatctcaggcgttcggcataacctcctgtaaaagaaagagaaacaaagggagaagagaaagctttatgcaatacctatcaaaataatatacaagtctatccaagatagaaatagtaatacaaatcccacatcttataccaaggtatagggaactcagaaaacgacattgacaagtttaccccccttgatgacaataacccgccgtctcttctcccagtcattcttctcccgaagccacaacttcccctcagaagtctctaacactcgactgatgatccaatcctgttcttcctgcgaaggagaattcttgccctgcggcgatgctgtcaccggagactccatacgcggaatggtcacagcacagcggagcttgccgttgacctggacggcgaccgtttggccgccgcgagaggagagggtttcgacttggtcgggtgtgaggagggtgctaggccagggggatgaaaggatggatggcactggtgttgaggaggtggtatttgtgcttgcgtgtaggacttcccatgattcagaggctaaggctggggcaatgggggctagtagacggaggagtgatgagacagataggtataggatcagaggggaggaggcgggtgtcgaggccagggtgttggtcagcttgattaggtctgagatgactgtgttcagactgtaggggttgctttcgatgcaagtggtgacggatgcgatggtgttttgggtggctaggacggcgcctgcatcggagtcactcaggtcctggagtgatgacggaaggggggcggcatgggtggtagatgatttcagatctgcttctgagacggagaatgatgcctccgttagagtctgctgggtgtcttggacgagtttccagagtcgaccgaaccagcgctcgacgccgacgaccttggcttcatcccattctagaacctcgctgactggtgcggagaacaggatgtgcgcgcgagtagcgtcggcaccatattttgatgttgtgctggtaggatccacgccattgtacttgctcttggacatcttttcgaaggagatattaggggaagcttgtgttccctttatcaaaggcttgtctggattggtcaggtcaacttccgacgggagaaggaagcggcctgtcgaaggctcagtgaaggtctttccatggaccataccctggctgagaagcattttgaatggttccgcgggtgcagcagagtccctcgttgggagcagctcagacgagaggaatttgtaaatgaaccgagcgtagagaagatgcagaatggcatgctcgataccaccgatatacacatccactggccgcatcaccgcaggagagaacggggcttccttgttagcatagtccaagaatcgcaagaagtaccaggacgagtccacgaaggtgtccatggtatctgtgtcacgtcgagcgggaccattacaactggggcattttgtatggacccattcacctgaggattccagagggtttcccttctttcccttgagccactctccctcgattttcggcagcttcactggaagatccttgtcgggcaccggcacaggaccacagtcaccgcagtggatgatagggatgggcgcaccccagtatcgctggcgactgatcaaccaatctcgcagacgccagctctcaacgaacccagcctgaccgacttgctccaggtcattgacaatcagttttgatgcctccttggagtgtaacccttggtactttccgcagagcgaattcaatacaccctcttgcgtgaaagcttttgtgtctgacgtcgggacgacgctgcttgcttcattgccacttggctcagcctcgataacaacagggatcgaatcggggttcacattctccttaaagaacatcatgtccctgttatcatggcccggaacgcccatgactgctccctcgccatagtcgttaaggacgtaaggagccacaaagacaggaagcttcctcagcaagtggggtgtttctgtatcaattttgcacaatggatgagacacctcaatgtcgggcagccggtatcctgctttggagtccggtgcaagcgacaaggaatcgctcaggaatttgcgaagtgcctcgtctttctcggcagccttcaacacaatagggtggtttaaagaaagtgctagatactccacaccatacaaagtgtctggtcgggtagtgaatacattcacatcgatttggtcacctccaccgatcgtcacagggaatgtgaccttggcaccgtaagactttccgagccaattgcgttgcatcgacaggacacgctccggccatcccccggcaagagaatcgaggtctttcagaagtgcttctttgaaatcagtgatcttgaagaaccactgcttcaggttcaacttctcaaccttagcgccagatctccacgagaatccattggcatcaacctggacgagaattagcgcaaatcaagttttgccctttgatcccgactcacctgctcatttgccaaaacggtcttatcaacagggtcataattaaccaacgcttctgcttgatacgccaaacccttctgatacaacatcaaaaagatgcgctgagtatgctcatagaagtccggtgaacacgtagccagttcctaagccacaagtatcaattagttatcttagcggccgaatcaatacttcacataaacatacccgatcccaatcaaaatccgccgaaatgcacctcaactgctccttcatctttgagatattctcctgcgtccacaccgcaggatcaatacccctctcaatcgccgcattctccgccggcagcccaaatgcatcccaccccataggatggagcacgtcatgtccgcacattttataaaaccgcgagatcacatccgagatcgtgtaaacgcgcaggtggcccatgtgcagcgtgccagacgggtatgggaacatggacaggatgtaggatttaggtttctgtgttgtgtcgggtgttgagcgcggcgtggcgcgctcgctttcccattttgcttgccattttttgtcaagggctgggaggtccagtcggcgggttgctgtgctggctaatcgggtaagtgtgtagactggtgagagggctcgtagggttgggcgcgtgtgaatgcggccaggcgcgacggcgctggttaatcggagtcgtgagagggattgcatggctagttggtcattatgtgtctaagatatgcttagatattggggtaattggcgcgattggtcatgtccgcgatttgaacgcctgacttgtctgcggatcttcaaaacttccccggagcccggatagctttagccccgatttggactagcgtatcaacgctattccagaagccctagatatgaagatgtcgagtcttttgtacttgcagggaattaatatttgggaatgtatttatgttcaatgaatatgcatatcctgcgtcgcaactctctatatattgtacactctactctatactaagtctacattctcaaaatatcaccactcctatcaatgccaccccggaaatgatccgcaatcactttccctccgagaatagtctcctcgacaagcccctccacatgcttgggctcaatacgaccgtaccaaatccccttacccgccagcgggtgtggctccgaagaagttcccactatcatcttcggtggtatataaataatcacattgcctgcgtatttgtgtcctccaacatgactgatcagaccaatattagcgtgcttagggccatccaccgtagtcccatcactgtctgcggaagtgaatcctcgcgcttgcaacacgcgcttgaactcgctttccaacgcgggggccatgagaccacagcgcatgtcgcgacctccgtgtccacatattaacactgttggagagtgattgatatcgataacgcctgggaagtgtgatgctagctccggggatcgggtcatttgtgcttgtttggttgcggagagagaggagtgcatgttgtggagtcgttcagggagaagatatgcgcgcacgaaggtcgtaaggtcggttgtttggtcgggcgatgaggttgtgttcacgggtattgagggaatgtatttgaagctggggaagaggaacaccgaggcagaggtggaggaggatcctgcagctggtgtgatagatgaatttgtgaccaagatattgttgaaaggctaaagcgatatgatcctgtataagcaagagcttgcgcattcattgggttagttgaaccacttacatcaagatatggcccgccacgacctagcaggctcttcaatcctctcacaaggttaccccagcctttgttttccccatcattctcaatgcgactcgtccagtctggctgtcccgtgcagacgagaagctgctgcgcgtaggcagccatcgtcccatttaaggcttgttcataatcaatcggtagatcctccggtagagcgggcgtgggcggacaattgcagcttggttcggggcatgtcttggtaatggggaagggaggggggatttctaggcgggcgcggagtctgctactgcgctgaggggtagacagtagacggattgtctggcagtttcgataggttcgcccgctccagtcgcgcttgagcgattgcacaagtattggtcgcattataatagatagaatgtatacaatttcaaagaacaaaagtcagaaaatagaaagaaatagatttgaatgtccgagcgccgagtccgagaaatcggagattcggagattatcaatcgccgccgctgattcgttgatctgcgcagattatgctgattacgtcataatacaatcctaacaatcgcaatgttcccaatcatcctcatcatcactgtcaatcaggatcccttggacaaatcgaccgacaacctgcaagaagtctcgcgtttgaggcacatcatgagtcccacagaatttgtaaatctcgacattaacgcaatcctttgctaacgacaaggaccgggatggatcaactactgcatctaaagatcctatgacatggagtattggttctgatcttggggtaatatatcggcgcatacgcagggtgtgctagctgaaaactgcttggcaaatagcaaactcgatcggggggtgatctagaaaatggaaatcataagtcacttacaaatagcggcgaagacccgggagtgcttactgtgagattgaagttgcagattgatactttcttttcaagaaggtatatgacaatagcagccacggcggcgcctgatgagaatcctttggtcccgataaaaggtccatgtctctcaagaatatcagaggcacgttgaatggactcttcaagagctttgatgtctctggatctccatcaccccaggcctgcttgtcgtctttgtgccatttttctggatcggctcgcagttgacctaaagggtaaaaaaattcaatgttgcttatttggcgattatggtcctgctgcagggttttgagcacggattgctccatatattgtcgtatgaatctagttttgcattagaaaaactgtccagaatggctgtgccctaaattgcatgggtaaactggctgcttggcttctacgggaaagacagaaggacagcgctctcaccatgcaacatgaggattttaccacatgatggggtctgatcgaataatatagttgagttcatagtgatagttcccagtattaaagggttcggcgatattctctcgagtgtttagatgttctttaatggggactctttgaaattaaaatatatattccaaagccaaatgcatatacgaaaggtaacacatagtctattgtgcaatgtaggtcgacatcaagtgcatggcgatgcttcttgtgttaacactatgcaatcaatgataggttcatcaaagttgtaatgttagataaagtccatttgcagcaaaactcgacagataatgtctgcatatttcccttctcagacaaatcattaatcatatgagccctatgttgcacaggaaatgtagactggatgtcattttgttaagatcgacacgcgggtatacaatgtacatcaatctttacatcatttgaaatatgaaaacacatccctggaatgcatcttcgtttctactattcattttcaaaatggttcaagccgatggaaggacttctgtcatttcttagcatccgataccgctaggcagctggtaatgactgaatgtgcgccgtatctactcgtgcaagcaagcctcccggtgtccccgctgcctggaatgatcccaaatctgaatttatcaagatgaagttctgtggcaagggtttgcaggttctgtctcttggactgtcagttatgaaaataggtgtattgtaagtgtgccgaatgagggacatggtattcctgcagttcaacctcgggactgtcgcgcgctatggctgacaaaagcactgatgccgtgcgagatagtcggcacatacatgcctgcgctcatcttggcacgcttgtcagattaatgaaaaaagacgcgctctcttgagtagtgcagagcgcaattattgtgtgcgtatatattggttattttgtcgaaggcgagtatgattgaggcggggaatatgtgagctcgacctattggtatgatccacgtgttgaggtccaggatgaagtgtgcgggaaatgggcttgcgattacttctcatggacggcgaaattctggacgaggtctttgtggaggaggcagttcgtcagttagtggatctttttgtccggatctaactgtgggtgtgttgaataaaacaggtgtcaatagatggttgtgcatgtacaatgttcgaggctttaaagactgtaactgtccgattttggaaggaaatcacatcacgattccatattgctggcgatagcacacggaggttgaggcgcatcccggaagttcgagggtgacgaatcgaactgaatggcccccgcactgatcatgcgataatacgatatgcgccgaagccccggaccatcgtctcacgtatgcgacttgtaacgaaatccatggcgactatgcagattaactgaatgatcaagatttgagtaggtaatttttgggatcggtggtgggttgcaacggtagttagcatatcgtacggcatcacgattctctggtcatcatttcaaagttcggttttcgacaacgtagcaatgcgatccactgcccgatcggggagcaactcgaaacatattgtgcttatcccaattaatttgcagtcctgtcaaagagaccaagtgcgctgcgaaaagatagatgaatccagtcttcgacctagataaggggaattaagaaatccacccatgctcgagtccgtctatgatgcggtcatgctttctgtgatctccatgatctgatccggaagctcatcggtggatctggtgcggatccatggatatttctccaaaacctcctcgcgaggaggcaatgtacattatgggtagctctgtaggggagtagcggggccggagttggagaaggtgacagggaggccgaatatcggcagaagtgcgggaattgttcggcatggctcctgaggaggatgccatcgagtgctggggaacttggagtgttttagtaccttgtgggatagtatttacaggagcctgcaggttggagatgctaattattgggggtcgactggtgtacggagtatctgagttgcgtatacgaaattggttgggtttgactttacccctcattatgtcagcagatatagttactcctcagcggggtaacgctcggatttctgatcggctgatgggctgatgggggagagatgggaagaaccaaatagttagtgatatggaatactacgatgaagatagagagagatattacgaggcatctgatccactacgagtgcgtcagttgtatgtgtaactgtatactacaaaagtgcccccgcacgttcacccattgagagctttccaagggttaagttatgcaatagtccatgggtgatagcatagcatataaaagtagaatatacacacatgcacatatataatatgcgatatgcaatatgcaatatacataatacctatacaagtggatatggcaagctacgcaagtccgaaaatgataggccatgaattcaaatcaatgtactccgtcctacattctgtcctctgtccctcgtgcggagagttctccaagtggattcgctcccagtttagtccgactctcccgtttctatgcgacttattctgaggggacaatgcttgtctttgtagcgagggggatatataacctagctccagttgctgttcggatgctttctttcttctcactctatccaactctcatctcttcaactctacctgtaagtctatcctttaccatcttcctattccactatttcccttatagtcacatcacattccctgggttgcaagattccccacttctccccttcagagcttgcaaccggttttctccaacgctgtttttggacgctgacctcatcaactatttataactatcgatctatacacgaatgtatataacggagcgctaaccttctttttagtgatattttgaatatatcttataaatattttatatttcttcacgatggtatttactcgctctcttacccgtcaattaggacggcccttcctctcgagctctctcaagccaactgttgcctccagttccttcgctcgggcttcaccgttggctggctatatttccggtgcacgtacactaaccgcaacttcaaacctccagggcaaagttcttttggttctttacgatgtaggtcattctcacttcatacttcctatacttcaatcgctgacccggtcttgtttgtgatatagggtggtattcactcccagcagcagcctcagctgctcggtactaccgagaatgagctcggcatccgcaagtggctcgaggaccagggtcacaccctagtgaccacctccgacaaggatggcgagaactccactttcgacaaggagctcgtcgatgctgaagtcatcatcaccactccgttcgtttctgatgtgcattattttaaaaacctccactgattatataacagcttccacccaggttacctcaccgctgagcgtctggccaaggccaagaagctcaagctcgccgtcactgccggtattggttccgatcacgttgacctgaacgctgccaacaccaccaacggcggtatcaccgtcgccgaggtcaccggatctaacgtcgtctctgtcgctgagcacgttatcatgaccatcctgatcttggtccgcaacttcgtccctgcccacgagcagatcaaggccggcgactggaacgtcgctgccgtcgccaagaacgagttcgatcttgagaacaaggtcgtcggtaccgtcgccgtcggccgtatcggtgagcgtgtcctccgccgcctcaaggccttcgactgcaaggagctcctgtactacgactaccagcccctctcccccgagaccgagaaggagatcggctgccgtcgcgtcgacgatctcgaggagatgctcgcccagtgtgacgttgtcaccattaactgccccctgcacgagaagacccgcggtctcttcaacaaggagctcatctccaagatgaagcccggtgcttggctcgtcaacaccgctcgcggtgctatcgttgtcaaggaggatgtcgctgaggccctcaagtctggtcacctccgtggttatggtggtgatgtctggttcccccagcccgcccccaaggaccaccctctccgctacgccgagcacccctggggtggcggcaatgccatggttccccacatgtccggtacctccatcgatgctcaggtccgctacgccgaaggtaccaagaacattctcgaaagctacttctccggccgtgaggactaccgccctcaggacttgattgttcacaagggtgcctatgccaccaaggcttacggtcagcgcaagtagagagccctgtgtgattaagtatgaagtattctccgggtgagagacttcgtttcatatttcttgttctttattcgagatgttcataaaagtcccaattgctcccgatggcatgggcaatactgaaaataggtagcatctttcacgataccaatgaataccatttccaagctttccttgttttgcacttgtctttgaaatttcttacccaatatgtaatcgcgaacaggttgtttctttttttggacgacgttgcttacttcgccgtgcaaaaagcatgggaccgagacacgggtgtcactcctccatgaccagtcgcgtgacaacaccctggcataagagtgtccaagctccttatatggaggaccagggaggcacagagagtcaccgaggcctccctttggttccacccaggttcctttcatcttaactttatgttgaggtggttactgactctctgttgcctacagtctgacgtttggagttgctgggcccttcggcgctaacggtgcccgcgattgttgcgagcaccgaccgcccgggcactgccagcgtatgactaagcagccgaacatgtggctcagtcagtctaactaacgccacggaacacccacgcctcaaaacttacataaaccactcccgctcaaacattcgaccacgtcccctcacttctccactttctactccacactacggaggcctccagccgccatgggtgacttaattactattggtcaatattgcctggcagaaaatcagtcatacactcaacttgattcctcggatcgacccccctaccattatactctttatcattaactgctttataataaattgctttatcaactgctttcattaaatcaaggagttatagggatcagataaaacatacgaatttttctaattaaaatgcatgtttatttctatacaatttcaaactactccgtagaatgaatgtatgtagtggtagaacatatggcagaatttcgtattgtacctgattaggaaagcggtagctggacttctaggtatttcaaggtacccggttcttactaagtaacctaatccccattcgggtattaggttattacggactaattaggaaggcggtactaaaacaactcaggtataggggtataagtaacaatcccctaaattaattctatcaccaccaataatagagatagtttaattcttcatgttgacaattatcatctacgaagtatgcgtgtatcaattaaagaaggcggagagaaaagcggtaaagcagttttgaccaatagtaatttagtcacccatggctatatctacctccaatcatcctaaaatgcctgtcagaatccctcaatatttttcttgttttagccccgctgctcgccgttgggtacccgtggcctcacggcccatccagagtcccggggtgcaaagctcagcccaaggaaacactcctagatctcatttcaacatagtctcttggaacattgactactccagtagctatcccacacgacgctgccttgatctcatcaaccacgttttcaaatatggagttcctgacattctctgcctgcaagaggtcaggtccgaagttcgtgccagtctcttaggcaaccgcgaaatacgccaagctttcctcacgacagacgccgcgacggacctagagtacaagcgtttcataaccatgaccctgctgtctaaagaacgcttcgcgtatagcctagactcgaaggagatgggtggatcaaacgatgaggggaagttcattgtcgggccggtttttcgcgagcacctcccgagtgcagccggtagggatggactttgcgtggacctcatccctccttgcgcaccggacaccttcctccgaatcataaacgcacacctcgagtcgtgcgatggcttctcctaccgcgctgcgcagctcaagcaactttctagcgtccttcacgaacctggctgcagtggtggcctcattgtgggcgatttcaattcggtcactgatgacgatcgcctgcttatcgaggagaacaagctaaaggatgcatggctgacgttgcacggcgatacgaagccagatgcacctacgtggagtgtggggaggaggagggaccctaggtacgagcctagcaggctggataaggttgctatggtaggattggaagcggagatgatggagcttatgcatcctctctgcatcaacgccaccaagccgtctgaccagattgagtggagtgaccacagtggactgaggtgtaagttttgcgtctaaatgtcgttgagcaagatggagatacaatctgcccacgaccgtgaggactccatgaagggaatccgtgacttcgatgacattatgtccctcataaatgccggcgacaatgtccaatatactcccaaggaaagagagaagtacaagagagcctttggggaattcgtcgagacctacattgagcagaaccccaagtggaccctcgctcagtggaagaagaacaccaatcttgagtaaggattcgatggcacactcattgtaactccgtcttcctgggtacgtcttaatgattcagtgcatctatttttctcggatatcggatggccttacgccccattatatcgctagcaacaaatcccaaacatccgtccataccattcttaacatttccttggctctatcgtgactttcctacgcctccctgatccggcttgagcttacatggaagcaatgaattcactggttgtggccgtgtccgtctgatattgcctcccttgagtgaatcaactcgatacttcagtggatgctgagccagtagagaccgtgattcttgacacactgtgcagataacgagaaagaaaaaggttgaaatgttcttattaaaaagctcaccgaaaaaagaacgcgataatgcgcctcaccatccttcaaaaggctgggaccaagacaagtagcatccacgtgagggggaactgtcgtctctgcgagcatccaatcagctttattcaattcctctgaaagtgaaccagcacagagtcctggttatgcattcgagtcacagcatcccttcgctcatgaatagaaagcagaggcaccatgctctcggagtcctcgatctgctccggtgtacgttgctggtctttaggagaggctaccatgatgcctgaggatagatgccttgagaaataatctcaataatttcttgcatgagtcaggttaataagcggcaaccctaagggggttttcgcttgagcgaaaataactacaacatcgtatgttatgatatgcagagcatgaggatcggtggagctatgtcgatctcaccggattaattgagtccagcccttcggtggagtctagaacgtgtacggagtagagccgatgtctttttttagacattcttgatggccaagtatgattggtagcagtagggtctaaatatgtatatgctatcaatctataactacatacaagtacaaaaaaggacaaaataactctattcacaaactcgccacgcttgaaacaccaaacctgtgagcccagatcatacaggcctgcaaaacatccatagacaaaagctccaaccccaagaatgcagatatgtatatgtgaacgtgatcttcaacgtttcaaagcctccctgcccgtacattcccatgcccctcactcccctcctcatcactatcatctataaacccctcctctaaatcccgacttaaacgactatccgtctcagccccggtatcacgtctctgttgctccagcgcaccccgcctcatagaatccctatccatcccaaccaagatctccccttcctcgtcgtcaatactgatcgtatcgtggtcggctacatgcgcgccccaccgccaccgagagggaaggaagaagtgcatcactttatcggctatgcggtcgcgtagggatagtgtatgtgcggatatagtatgtagtgggagatattgcgagtagcgctggtggtagcggcggaagaaggggattatgacgcatgaggctaggatgtagattgataatgcaattgcggctgggatgaggattgtctgtatgtgggttggtttgtcagctttgtgttcttttaggtcttggtcctagtcttcactcttggtcacggagtaacggtgatgtgtggcttgcgcgtcggaatagggggttttgtacacaccttggcaaagacactggttgatcccatgctggatgctgggaattgggcttcaaagcgcacctcagagtcgatgatagagtggtgaggtttgagggttccaaggtttgcgcgagagattgcggagcgaggtccacgcggcaggatcggcagatcgacaaacgaacggccattcgggatatcagagatgtcacttttgttgatattttttgatatatcacatcattaccttattcaaatagtatctgcttcgtagaactagactacctgtatgtaactaataatagtacataaaggctaactaatgatagtagtatataaagacactcttaatgacaacatatagttagttatgaacatctatgccgatgagtttacctatctaataggtagtctgagtctcatataacatgttctcttagctcattcactgttcattcccagatctcctttacgagcctatcattctttctagtatacgtacgcatttgctagcaggcgccaacgggctcgtagtgttcatagcttttaatatggttaaaaatagccaccccagctggttagcgctattatctatactaccagactaacatataaagatcgtaggctcacatgggtcctacactaccggacttaaaaagccattcaagttacctccactctctcttttactccgaacaaagaaggagtgtaaaagaaccggctatgtctgaggtaggtgccaaatgaagatgtatatcaggaatagatatagtaaatagtgagggacttgttctagttagcttacaggatgaactatggacatgcccgaagtagtttagtggcagagtatgtacctatcttctgcgagactacacacttactgatcttcatatgatgctgacatatggctggtattatggcttagtatccacgctcaaccaacactgaggtattttctctttgaagctccgttcattccggtccagtggacgtcgaccttggaagggtccaagtataagcttacgtgatcttgataatcacgtgcacggtcggggagtttctccgggaagccccctaatatcaatggaacgattagaagaacgctcgggcttcgatcctggcgtcaaactggacttgacatttgcaaaaagcttgcatgttcatctccttctctcctattttgctttctttgtggggtacgtgccgtgaaggaagccccttacccctcagtctctcgcgcctccgttgtcgcaatccgggtatactaactagcactagccagggagggacaaaacagagagtaacagagagccactttcgcccactttgaatgtcatcatcttctccgatatcccttgcgatcgacagcgccttatcgcgaaatagggcatccctatttaataccgttcctgagagtgttggaggggcccttatgctgcgccctgcctcatcttattgacgcccgccaaaatgcccaccagttcacaagccgacaaacctaagcagacatcgagtggaaagtcgttcttcggacgaaagttgtacaaagagaaaccgaccgaggaacgatatgatagttatggagctccctacgatggcctggcacctccgggaagcgcgggctcacgctcgtcccgccattcgaagcggtcttcgattcaatctgtcgacatgacccaggatttcgacccaagcaatatcgcacacacctcaggcgtcatcacctccatcccctttgaaagcctccccaccgataccaggaccccaattccaatcgataacatgtctcgccctagctcatcgcgccacgagccttcccccaaccatctgggcaaagctggaaatgactatcatcaatatcccaccgtgacctctacctctgcgccaaatgggtacgtcccatatcctggacctcgtgcgcacccgcacatctcgaataacaccagctaccccggcagcaaccccggcgagcgaggtgccagacaacaacagcagcagcagcaacaacaacaatatcagcagcagcaacaatatcagcagcagcagcagcagcagcagcagcagcagcagcagcaacaatggggacggccaggcagctcatcagcgaacaatgggcctaaccataactcctattctattgattcgtcctctaactcccgcacctccctcgaccaagccagcatctattcctccgtttcttctaacacgcgcggttcaagctacttctcctcggacaattcctctcgcactctcacaacctcgcattctagtgaccgtcccgccttgtttcccagttccagctcgggccgtttgtcaaatgcgggatcctcccaccagatatctgtaccggccgctatcccccggccacaagataactacctgactcgaccgagagatgaccgcattgtggatcagctctttctagagctgatgcagaagcgaggatggcaaaatcttcctgaacaggctaaacgacagatgttgtcgtaccctgcttcaaagaaatggacattggtgcatcaggatcgcttgacagagttgcaaggagagcaaaaaagacggcaaaatgcgcgacaaactcacggccatgacggcatgtctggtttgcttgaacgtgctgatgaagaagggagcccggaatggtatgtgaagaaggtgatggatgacaccattacgtccaagcagcttgctagtttgagtgtcagcttgcggacacagccaatcaggtatgcaatacccccttttctccatatcgtgcgtatcactaataactaaacagctgggtgaaagcctttgttgaagcccaaggccaaatcgctttgaccaatgtcctcttgaagatcaacagaagaaaagtctctggtcctgtcccggctccccctacaggcgataaagatctagaccgagaatatgatattgctaaatgtttgaaaggtctgatgaacaacaagtatggcgcagacgatgccctagagcatcaaaatgtgctagttgcactcgttagctcgttatcatcgccgcgcctcaatactcggaaacttgtcagcgaagtcctcactttcttgtgccactggggtgatggacaaggccacctaaaagttctacaatcaatggacaaggtcaaacatgatcacaatgagaccggtcgcttcgatgcttggatgcgtattgtcgaggtcaccatcgacggccgtggaaagatgggaagtttggtcggtgccagcgaagagtaccgcagcggaggaattggcatggagaacctcctcatggagtatgcagtctcaaccatgatccttatcaatatgctggtggacggagcagaaacggacctgcagctccgttgccatatccgcgcccaattcacatcatgtggaatcaagcgtctgttgacgaagatggagggattccagtatgaggttatcgacaagcaaatcgaacgtttccgcgataatgaggccatcgactacgaggaccttctccagcgggagggcagcagcatgaaggatagcatcgaaggcgaagttaaggatatgagcgatcctatgcaaatcgtcgatgcaatcacgtccaagatcaacggcagccgatcccatgactacttcctctcggctatgcagcatatgcttctcatccgggagaactccggtgaggaagggctccgtatgttccagctcgtagacgccatgctgagctatgtggccatggaccggaggctgcccgaccttgatcttcggcagggcctgaccttcaccgtgcagagtctgctagatcggctgcacacggatgctgaggcaaggcgcgtttatgacgagtctcttgaggctcggcaaatcgccgaggctgccattgctgagcgcgacgagatgcgagcgcagatcgagctcggtgcagaaggcttggttttgaaattgcaaaagcaaatcgatgaacaggctggtattatcgaactgcaacaaaggcaaaatgaatcgttcaaggccgaggttgcagaaatacaaaggctgcgtgctcaggaattgcaacgcaatgagctagaaacccgagaactatacctcatgctccgagatgcccaggatatcgccgcttccaatgcccgaaagaccaacaaccatgatatggcagaggcggcagatccatcccagatgcccggcatcatggaccgcgaacgactcatggaacgtctagaacgccagcttgagcggacaaagacccagtttaagctggagggcaaggtctggggccagcatggaccatcagatcgactccgcgagctgcgcgagaagatggaaggtgaagtagatgacagtgagtactttgctgagtctacccgccgacacctcgaccctggagctttgggatctgtttaccgcaagcgcagccatatccctacgatggactcgactttggaagacgaggaggacatcccactagatagcaatggcgaaccgatgtatgagaggcctcgtctggtggaaatgcatcgtcctcgtttgaacgctgcccagactaccggcttcctaggcgagcttgcttccaaggttcccaggtttgaggctgaagatcccgatgttgttgaaggggaacaggtacccaagctagaagataatgaagctgctacaaaggctatgccacctcctcctcctccagggggcaatattgttcccccgcctccgccgccgccgggagttatagctcttaccccacccccgccgccaggaggcaagattcttccccctccacctccaccagggggcttctctctcccacctccacctccgccagggggctttactcttccaccgccgcctcccccgggtggaaaaattggtctacctcctcctccaccgcctggcggaatggctctcccgccgccccctccgccaggtggtgccaagggtgttcctggattgccgcctccacctccgccccccggcggaagagttggcgtgcctccgccgccgccccccggtggtggtggtttcgctcttccaccacctccccctgttcctggagccaatggcctgatgattcccccgcctccaccccccagcgccgccttaggtacaggctggagacccgcatacatggttggagatgtttcgccgtctacaattcacatgccattcattcgacctaagaagaagctcaaggctcttcattgggacaaggtcgacactcctcaagttactgtttgggctactcacgcaccgacagctgaggcgaaggaagaaaaatataccgagcttgccaagaagggtgtactggacgaggttgagcgattgttcatggccaaagaaacgaagatatttggagccagcactggtgcgaagcagcgcacggccaagaaacagattatctcgaacgatctatccaagaacttccagattgctctgtccaagttctctcaatacccggccgaggaggtcactcgcatgatcatccactgtgacaaggagattctggataacagtgtcgtcatggacttcttgcaaagagacgaaatgtgcagtataccagagaacgtagccaaacttatggcaccatatagtatggattggacgggccctggcgccgctacttccgatcgcgaacaggatccctccgagatcactcgcgaggatcagatctatctctacactgcatttgagctcaatcactactggaaagcaagaaacagagcactcgcactgacccgcaccttcgagccagagtacgagcacatatccacaaggctaaaggaggttgcacgagtcagcgagtccttgcgggactctgtgtcattgatgaacgtgctcggtctgattctcgacattggaaacttcatgaacgatgccaacaagcaggcccagggtttcaagctgagctccctcgcccggctgggtatggtgaaagacgacaagaatgagactacctttgccgatctggtcgagcgtatcgtgcgcaaccagtacccagagtgggagggcttcctcgatgagatcaacggtgtcattggtctgcagaagatcaatgtcgatcagctccgcaccgacgccatcaagtacattagcaacattaagaacgtacaggccagcttggacgctggtaacctgagtgaccctaagaggttccacccacaggatcgcgtcagccaagtcgttcagcggtccatgaaggacgccagacgaaaggctgagcagctgcagctctaccttgatgagatggcgaaggcttatgacgatattatggtcttctacggtgaagacaacgcagatgagaatgctagacgagatttctttgctaagttgagctcgttcttgatcgagtggaagaaatccagagagaagaacacagctctagaagaatccagaaggcgcacagaggcatccctcgctcgcaagcgaatcaatgtcaacctcgccaacagcactcccaccgcagagacagtgcagtcgcctgcttcaagtggtgccatggactcattacttgagaagttgcgtgctgcagcacctcaagccaaggatcaacgagaccgccgccgtcgtgctcgtctaaaggagcggcataacgtccgcgtaacttcggggaccaagccaccacctgattcgggtgaggcggaagaaggcgaagacggagttgaaaagacaaccaatggcgataataatgacgagaccggtcttctgagccctccgagtaccgcgccggaagatggcaagcaggaagctcaagtatctgaaggcgaagacgttgccgatcgtgcggccagcatgcttctcggtctgagaagtaattccgatgcaggcggcggcgagcgccagcgacggagaagagagagcgcagatgaagagcgtcgtaaccgccgcatgagacgccgaaaccccacaggcgggagcaaagatagcgcggatggctctagtggccttgctacagttcaagagcctgcttctccttcgcagacagactcgatggccacagacgatcaacaaccccccggctcacctaacgagtctcaacctcccccttcaattgtcgtctcggagcaaggcgagtcatcacaggatccctcagttgccggttcctctcctcaaaaaccaactgatttgtcggattaagtcaatcaccgacagccgatttaatttaatgttttatcaattctcattgatgatgcattggattcaaacccaaatgttctccattgccatcaataccactacttactacttactacaaccgccctcgattgtataatacccattccctacttacacttctactctttgagctgccctccttgatttgacgagccgagcatggtgcgatgatacaatttctttgtttcttcttttctgtttcatcttaacagtatcccttcatgtgcaatcattttctcttttctttttgttatccactcccgcatacccaccgacaccctgtctccctctccttgtacataatccctttccccccgtcttcttcatccaacactacctgccatggaaatgtcgcgatgattggagggcgtaccatcgaattgcatgttgagctcgatgttcaatgtttcctgcattgtcgccttgttctttactccctacttccgagcgcatgtcgtggtcaagttttatatctgctgcgtatccttgactagagccgcattagatggactgctattgcttgtgattttcaggatcagaatttaaagactcgcagttagacaaaatctatgttctcgatctcttccaagctctcgattagcatgtatggctcgtgaaggcggtgatagaggcggtaagatagtgcccgatcctcagtcgcccttatcgcaatataaacatcggaccaacatttgaacatttgaacaccctcggcatctaccaatatttcattggtttaatcttgcgcatgcgagcatctcgccaagttctgcgttgggtctctcccttcagcttgccaacgagtcaaccatggcaaattatatcaaataaatcatgtatccgacgtcatggctttctctccgaatcgcgtggctgggctcccggacaagctcgagctttctcgtctactcgcccagctagattcatgctagatggagactctacaatatatgcgctctctactgcaactggacgagcagccattgcagtcgtgcgtgtatcgggtccggcatgtgcctcggtatgtattcctcgaagaactactaaagcaccagactaacaatgccattcagatatacaagagtctctgcccaaaccacccgcttccaaaaccgcgctatgcagccctccgcaccctctatgacccaacccaacccccaaccgcaaacacaatcctcgatgccggcgccttagtcctctacttcccctccccacgaaccgcaacaggcgaagacatcctcgaactacacatccacggcggccccgcaataacaaaagccgtcctttcagcaatcgcacagacaaacaccccagagcaaacagtgcgctacgccgaaccaggcgaattcacccgccgcgccttcatgaacgaccgtctcagcctgcctcagattgaagcactcggcgacactttgtccgccgataccgagcagcagcgacgactagctgtgcgtggctccagcgacgcattgctgaatcgatacgagcggtggcggcagggtctgctgtatgcgcgcggcgagctggaggcgctgattgatttctctgaggatcagcatttcgatgagtccaccgaggagcttgtttcttctgttgcggcccaagtgcgcacgttgagcgtgcagatcggtttccatattgctaatgcgtcgcggggcgagttgcttaggaatgggattcgggttgcgctattgggtgcgccgaatgctggcaagagttccttgcttaaccgggttgttgggaaggaggctgctattgttagtactgagcaagggactacgagggatattgtcgatattggggttgatcttggaggatggtattgtaagcttggggatatggcggggatccgggctgagggtagctctggtgatggtgagggggttgttattggagccgttgagaaagagggcattcgccgggctagggagagggcgttggagtctgatgttgttattgtggttctttcgctggaagacactgccactggcgtccagctattcgttgagccggaggttctgggtgctgttaatgactgcgtggaagcaggcaagtgcctcgttgtggctgtcaacaaatgcgacaagctacacactgccatggaaagtggtgtgccgcagtcattgtcagatacgatccacgacatcttcccttcggtcccggtagaccgtgtatttaccatttcctgcgaggaagcccgtcagggagcatcgtctctcaataccactacagacccgggtaatctacaggtctttctacgtggactaattgcgacgtttgagcagattgcctcgcctcttggcgtgggcggagatggaggtcaatatgatatctcgtattgggaagattctctaggtgtcacgcatcgccaaagctctaatcttcaaatatgtctcgatcatctggacgacttcctatctcaagcatcttctgctgaatgtcatgatggttcctcgcgcgagagagaactcggtcctcttgattcccatgttgaatctgaagtcgatatcgtcactgctgcggaacatctgcgctttgcggctgatatgctggctaagatcacaggaaaaggcgagagtggagatgtcgaggatgtgttgggggttgtctttgagaagtaagtactggagggtctttgtcttggtttgctggtctggatggcgagctgactgtcgtagattctgtgtcggcaaatgaacattccgattcaagtatggctccgacgaggttgacttgcatcgccgtcttatgatagcttgcttgttcggcaagagtcgtgacatcaaccggttgctggttgcaattgacatgattgaaatggttgctgggagtgcattgtccatcatgcacattctggacggcctaattttggccaggcaaaagcttggggcaagatctgctggcgggggcattgtatcctcctcggcccatggcgggaaacatcatgacgaattatttaggcagagataactgctggatcgcttcaaagtggtagacgggaggtgacgggtggtgatgtgttgatgaagttgcaagaaccgatgcaattgtgtatgaatagcagctcgatagactaataatgtatgcaatggtaacctaagaactaccaccaccgatcagcaacgcgatacttataagaaactaaagggaatcccaaaattgtctgccttggttgccggggtctcattcatcatcccaggcacccagaaacggactcttcgggtttatttccgaaaattagccaaaacactcctaatgtccttgtcaaagacagaattctgtcaaacatgaatgatctttctgagtcaggaccggatacagtctccgcaaagtactgaaaatacctggcgtgtctcagttaggccagatgtatccgatgccgaaagacaatacagcacgccctaaattattatattgagacttgggagctattcttgtcatcctagatgctacggtatcatgaagaattccaatgctgaggcaagcttcagctgtagccctgtataaggccgagtttgaggttggaacatgcttcctgggtgtcgatcattgtggttactcgcatctaagaaatttctatatttgtttctttctatttctatttccattggctatttctctttattcgctattcgactaagatattgtcggagtttcagtgtttcaattctaaaactcctgtcagatctaagaatagcgggatatctgcaaggaatgggattccttctagaaggactatcgtccaatcaagaatagaaagtaccaagagtaaaatagaaatgccccgagaataaaataagaaacccacgttgtgctgcagaacaaacatcatctctttaccctgtcatcggggctgacaaggaagtaccttgcagcctcggacaacaatgtaactggactatttagaccccaattttggcttaagagaataaaaatatcctttatactgtctataataagctaatagtctggtaggggtggtgtagagtataggccagataaccaccgatgtctgttgtgcagaatattctatgaatagcttcatcatccctgtctgtccatatggctttttcatatagggtgattagttttgtctggggatgcttacttcttgctaggagtttgttcaacccttggtttttgtttgtttctttcgcctttctttgtgtcattctagggctttttcatacatatagggcactttgacagttgatcattctacagagccttaccttggagagtgttctgtcaatgacaatactgataaacaaacaatacgaaatggaagaattcaaacattaagtatgttatttggcgacgtaagctattccacatattgcacgccattcccttagtgaaccagaaacaaaccaccacgcctcaccacactgtagcctacttcttctccctgaacaaacgaaagctctgatatctcctctcccttctaaaccaagcagcccatcacaattgcaatgaggttgaagtattcatgacgaaggaaatcaaaagtggatgtagtccgagccaggacactcatagtattcaacgtaaaagtcacggagagctcctagacactcagagggattgagcaagtatgagcaagaagggctgtgttcggcatggtgatagaggtaagagacctgaggaaactgggcacggcattggaagcagaagaagggattttggtcggtgagtcggttgccataaaacccatattcaggagactcgaaggcgagagtgcggatgcggtcctgcttcacgcaacggccttcttcgaggtggaagaggaggcctgagaacccgatccagtttgttgggcaaaaccagcattcgtagattggaagacccagaggattgttacggtcttgttgtgctgtagggggatgatacatgatggatgtggttgtggatatgaagtagattgatagaggatagatgaaggatgaagaatgagggacgatgatggaagaagcaaaagcagtggaagagtgaaagaggaagaggtcgggttctgtttgttttatagtcagagtacttgctattttgggattcggtttgctgcatgtacatccctattttgtttcccttctctgtttattcttagtctcagataccctctctagattattgcatttgatattgatatggaacttctataccaaaagatatatttcacagtcattgggagttatggctcaattgaacaaagacaagccagtttgctatttacttgactatgtcaagaccaacaatgatattatgaagacaaaccctacttaattacagtgttctttaaagcttcccacctcgcaagcacaatatcagaactatccgatcacagcgccgcgataccgcaacgcaaagcgaccagccaaccacatcgatcctacaactgcagatagagccagtccactgacagcatagagatcccagttcctggctttaaaggtagacatacgcatatcagccgtctgcaggtgcatcgggcgcaattccttgccgtctttgaaccgtagctcattgtcgtacatgagctcctcgataagatcggcggcatgatacttacgacgactagcaacattagcaatacgctgtaggcgaagcacattccggctgtatgtctcgttttctgatttgagaatcttcatggctttggtgtagacctcatctgatgtaaagttgagtttactcaaagactcggcgacacctccggcgaccagccgagcggtgttggcgatctgatccgagaagatacccattgataacattggctttccatggtaaagaccctcgttagcactagaacctccaccatgggtgaagtagagcttggttgattcgttgtcgaggatagcacgttgaggtgcaaaaaaggggaagatccaattcggatgtttgttgtcaagtagatcccctagggtgatttccatttcatttttatcgcctgtgttgaattggaaggatgcgctagcaaggttttagccgtgaggagagagatttgattctttaatggtagggtttcttacctgcggtcaaggtctgctcgacatgtcttgcccatagcccagatcacaccatcgatcataccatcctcttggaggcgattcgcggccttcactatcttcgcagcatccttatggggcaggatgatatgagtaccaagggcgatataaagaactgatttatgcctggccaagaatggcccgcactgttggtctagtggcgggtatgtcggactcaagagaggaccaacaggagcagcagttggaggtagatcgcgggggatttccagcccgaagaaggagttgacaaatatgagatagtctggtttgctgggcttatgaggcggatagaagacgccattgtcgcttcgcatcttcttgctccattttcctgcgcgtacgatagctggtagatctggaaaaaagaagatctcgttcatgattcgtagccacatggaagtatcctcggatgtcatggtccctggaagctggaagcctggctggcctgggatgtacgggcagggcaactggaataaaggcatattgggacagatgatggcgattggtaccttatactcaaagtgaatatcgttggctgcctcgacaaagaaatccgcaactatcatgtccggtcgagtcgcagggtcatccatgatctctttgagacgatggtaggtttgaggccagaaggagtcgaacatgtatttggattccatagcttgtccgacacccttggagatatcccatgcctgcatacgccgatagtgaccatcgagttgctcgggggttggtccggggcctaactgatgaagcttgttgacaaagtcatactcaggtttcacccagctctcttgtccctcaagtgttgcaaattcaatttcgtggccacgctccgcgagcacccggccaatttccaaaacaggggctgtataggttcttatttagtggtctatctgttcatgtttcatgttccatcttaccggcatgtgtgaatcctccggtagtaaccaccagcaatatctttctagataaatgtatttgggactggctcattgtgagaaatatggagaaatcaattactttcactaaaaacttgacagaaaagagcgaagcacttatacctcaagccccgaaatggcccccaaactaacatcctcaggccatactacggacttcggagagtttcaaacaaatcccgccgagtatagacttgataattgaagattcactggagttaacaggcaagtccagagagctgaacgatttgaacattcatgctttaaaatgatatcccataatggttacgggctttgtacatgtcctaactagaatgacaagttgctcacaaaaacatcccacttttcgaatcctcaaactgacatagagagttcctccccttttgaggcacatggaaataagtaccggcagtcctaggccctttgctactagctaggcctgagatttgacactatacatgcatgatgcaagtatgtaacttcaaaggtggcgagacaaacattacaaaccagtcacctgatgatgacagcatgtgactctttcgccgatatcggtcatggtcttcatctttcatatctcaactacttacaacatagaggaagaagagacctacgaaaagagcaactgggtctaggaagagaagaagagtttatttcatacttacttcatacatgcacctttggaagacaaccatttcatactatacaaccttgtatatgtcgatcaaccccgccattctcacgttgatctctcaaatagattatatcatagacaattggaaagtgagatgggtttttgatatgcctctactacgtacctcgtcagtatcagccatataagccatccaaagaaataattcctcaaccaagatcgtgactcaatggcgcataccgaattgactcataccccgccattgccaggattgacctataaaacattcaattgaacgtgtaatgtagattcggtgaatatatcagactgcacgttggaattccagtaaatcctgttgttggaacatataaatcgctatatcttctcttactgtccttgcaaggttgatccactacggtccacaccttttgaggtttttctctcccgcttcttttctttctcttttacatcagtccacctcaattaatctcactatgccttcccgacaagaagtctcctactttggagctggtccagctcccctcccgacatcagtcgttgaagccggcgcaaaggcattcgtcaacttcaacgacgtcggactcggactcggcgagatctcgcaccgctcccccaccgccaacaagatcctcaacgatgccaaagccaacctctccgctctcctcgatatccccgataactatgagatcctgttcatgcaggccggaggcagtggcgagttcagcgctgtcgtgcaaaacctggtccccgtctggattgagcgccgccgccgcagggctgaagccgacgtgaagaaggcacagcccggtgcggagcaggctcaggttgacgaattggtcttccagagacttcagaaggaggtcgatgaggaactcaagctggattacctcgtgactgggtcttggtcgctcaaggcttcccaggaagcgagtagactgatcggctcgaaatatgtgaatgttgctcttgatgctcgcaaggctaacggagggaagttcggaaaaatccccgctgaggatacctggtcattgactcctaccaagaaggagggcggcaagggctctgcgtttgtctacttctgcgacaacgagaccgtcgatggtgtcgagttccagcagttccccaagtcattggaggctcagggtcaggatgctgaagatgagcgtctcgtggtcgccgatatgagctccaacttcatcagccggaaggttgatgtcagcaaatacgcggtcattttcgtacgttgacttcaatctttccgcgtcatgagtgtagtacactaacaatatatacagggcggcgcacaaaaaaacattggtgtcaccggtatcaccattgccatcgttcgcaaggatctcctccctccccagaccgcgactccttcccctgctctcctccaccggttgaacattggcggtcttcccggcccaatagttctcgactacgcaatcaccgcaaagaacaattccctctacaacaccctccccatcttcaacctctggattgccggccaggtcatggccgacctgatggccgagttcagcgctcaaaaagttagcgggcaagaggaagtagccaacaagaaggcagagcttatctacggtgctttggacaagttcccgcaagtgtaccaggttgttcctgacgctagcgtccgcagccgcatgaacatctgcttccgtgtcagcggcggtgatgatgcaaaggagaaggagttcatcgctggcgctgaaaagcgtcttctccagggcctcaagggccaccgtagtgtaggcggtatgcgcgccagcaactacaatgctgtcccattggagaacgtgcagaagctagtaaagtacctcgaggactttgctacagcacagtagatccgtttggatataatatcggtgtttgagcgaatccaacctagggcttttggccaggaacgtgtgatgggtaacgaaaaaggacgccagaatgtgtccaggacagttgcgactgtttattcaacataactcccagtatatccatgctatatatatgctttaatgacaaaaatgtttcagatgttggtacaaaagcccaagagaaagtgctcagagcttccacacagcccattctttgagatcaagctccttgatgattccttttagggggccctggagctcctgaccttgcgcccacagcttaggcccagccatgtagctgatgaacccctcaggaccagaaaccaaaatcaaattgctcctgcgagagttgccttttgacgctggtgcaatagcacctcggatatcttccttcccaatgaacgtgttctcctcgtccagataataatccacaataacctgcccgggatactgggccttgagtgcctctagctctcgcacaataatagaagtttcttctgttcgtacaacatccacaggcttttccgaagtattatcccgactcttcgagccaaaccacccagagaaccagccccggcgtgactgcggcttcagcgagtcactatgaccaccagcacagtcatcctttatccgattcgcccacaagatatggatcgtcggtcgatgttcagtatttttgcgattcaaaagagaatacgcagcctgcagagctggcgcaatccccgtcccaccagcaataaagacaatatcactcgtttccttcgggatcgcgcattcgatcttgggtccacgaatctcgacgtcagcaccaacagcaatattatgcaggtagcgcgagacctctccgaagggatcctttcgaatgaagaagcgcaggcagccctcgttctcgtcgtcgacacttagcgatgtcgctgccgtcgtgggcagcggcgtgtaatcccgtccgatttgtaattgtggttgcttgaacatcacactccagactcccgtctgccatgcttcctcgtagacatcgtagttgctgtcgctgggtatgcgtggccgcagcgtgaaaaggctgctggttgccgacacgggctcgcgggatacaatgctgtatttggtgaatgtttcggggttcaaggtggcggatgatgtattttgggattggatataggcgcctgcacctgctgctgttgcgcctacgaaggcgatgcttagccagcggcgcgagttggaacggggggacttcggtgacgtcggggttgctgaggttgaagcatagcgtacaggccgagctacagctctgagaccctggctgcttctacagcataaagaagataggttgttcatgtggaagtgcaattgaagaaaaaagaaatcgcgggggcccggaaatgagggtcgaggccaagggagagccgggcgatcgacaagaaaatacacccccttggcggtttcttcttcttctttacttcaactcactttggagatttctcctctaccgacttgacattctcgttcttgacattctcttcaggcaatggagacttctcttggctactcctgacgacatacctttccgctaccctctccctctcctcgacgatttataccacacggacacaaagagaacatgtcgaatacatatcaagggaacaggaatggtagcctcgctgcgcctcgagactcactagaactcgcctccctcgcatcctcatctcccggctccgtaggcgggtcctcacgctcctcttcccccgacggtgtctcttcatcccgcaagctctcccttgaggacgaagatcctctcgcagaatcgcatcaagatgccgagctagggcgccgtcacagagctcagagctcgttctccatatcctcagcttttgatttcgggcgcaatctattcccgctgtcgcaaacacagggtggttacgcgcccctaggtactccgtccgcggacagaccaggcttcacagacggatcgctggagcggaataaaaccttgacatacctgaacggtctatcgctcatcgttgggctgattattggatctggtatcttctcgtcaccgagtcaggtcaatgccaacgcggggtcgccgggcgcctcgctcatcgtttgggctgtggctggtctgctggcctggacgggcgctgctagctatgcagagctgggaggagcaattccactgaacggaggctcgcagatctatctgtccaagatctttggagagctgacgggtttccttttcgcatggtgtgccgtgttagtattgaaacctggctctgcggcgattatctctctcatctttggcgaatacgttgtccgtgcgtttgtgggcgctgatgttggcgacgtaaatccttggatcaacaagggtgttgcatttggagggcttgtcgcagtgactctgctcaattgcatctccaccaagttcgctacccgcattggtgatttctttatgttcttcaagttcgttgctctgctaggtgtcacagtcatcgggattatagtcgctgtaactggcttctcggctggaggcaacgcaaatgaagaatggaagacgacaggatggttcgagggaaccaccaccgagatatctgattttgcagtggccctgtatgcaggtctttgggcatttgacggctgggacaatgtaagttgacactcaagtattttgaatgcttccactcacatcttacagaccaactacgtgacgggcgaattcaagaacccaaaccgcgatctgccccgagtcatccacacggcgatgccactggtcatcatctcctatctgctcgccaatgtctcctatttccttgttcttcctcactccaccattgaggcgagcaacaccatcgccgtccaattcggcgcaaaggtattcggcgcccccggagccttgattttagctctcgtcgtctcagccagctgcttcggagctctaaacgcaaccaccttcacaagtggccgactagtctacgcagccggcaaggaagggtatctcccctcaatattcggccggatcggtctccacgcctcctcgcaaggccctccagcaagcagccgactacgccgccgctcctgggccagcagggccctctcccgtttcttcggcgataactccagactcggcttcacgccaatatatgccatggcttttaacggcgtcctaacaactatctacatcgtcgtcggcgagttcggcaccctcgtcactttctatggtgtagccggatacaccttctacttcctcaccgttctcggcctgatcgtcctccgtatccgtgaacccctgttggaacgtccctaccgcacctggatcaccacacccattatattttgctgcgtgagccttttcctcctcagccgagctgtcatctccgagcccttgcaaacgctcatcgtcgtcgcgttcatcatcaccggcgtgcccgtctactactggcgtatttataagcgagatggtcggatcgatcttcccagctggaaattctggaagcgccgataaattcggggaaactctccgcctgctctgatcctgttcgcttgtatgattgtgatacccatgcgtatatagctagggtgtatggtgcgaagtgaaagctgtctctggtgtttgtgcgtgtatttgcgcttccaatggaagcctttttggcgacgatgtgatgaccatggctttaggcgggtgcattctgattgcttcatctttttgctcgttgcatgatgccccacgccgcgtctacttctaccctgttttattagagatctagcgcgctgcatactacatgcggtgcatactgtatataatcttcataatatttgcatattgtaatctctcatacaccaagcccatcccatatagaagctcgcacgagaactgcaggctgatccccgtccaccccagcatcagactctgcgaagaacagtagtccgaagcaattagcttctgggtggtagattcgtgtagatatgaccgttctgtcattgacaaaaacttctaacacacttgagtcgaagaaagcgtgcactcgaagagtttcttcaacctcgtcacctcgctcattcaggcaagtaaatagcgtgtgcggagcagtttcatagccatggtttacttcagtgtcgtcaatcaaaggtcgatggatttcgaaggtctcacttcgtgggtcccaggaaagggtcgtgcaatcttgaccgtctagatgaacgagtatcagttcagtatatataagatgaatccgaagaatcagaaaaatgtcttaccatgagtgtgtagaatcctgatacccacacgtgcacaggatctactaaccgagaattcggcgtcgatttcccatttagatgtccccaacagcatcgcactttgtgaaggtgatgtagacagggcaacgtcagcgaggtggctctcccgtgcactctgtctgagccgcgcaagtcggctatctgggttgatcttcatggtatggatcgtgaaagtaccggtaccaggtgcatcggggactgcttcaattgaggtaatcgaacttaactccgagattcgtgccttcttgacatttctcgttgtcatcaatcccactacacgaggaagtgaaagcaggccactgaatccttggcgatgacgcagagtattggacaggtcctcttccgtgatccagccatagacgatacgttgcgaggtttgagggtcgtagaaggagttcgccgcatagtagcagccatgatcgaagataccagagaaagcatatgaggctagagcaccgtctgtggaggtagattgcttttctccgttggatgtgacagatatccagaactggcctcggggttctcgtctccgacgtgcttcttgggccgcgtcttggtttgaactctcgaatggcacacagccctcggctcccattatgatgaagtcccgagacgtggtatcattggtcaaggtcatcagattagcaacttcccagttcagaccatagtcgcctgaccagcgagatggatgtagattgaggccgacgtcgatcaatgggccaatgaactcccacttgctgagatctgttgcttggacagtgtagacaaatactgttggagttttcttggaaatccctcctgacacaaagccatatagtgttgacggtgtgtgtttggaaagaggtccttcggcccaagttgtgataaaagaatctctccagcccgtcacattaagatgtggaggcgggccagtgaggaacgggttgcaggtctggcgctcccaggtcttgcctccgtcttgcgagacagctaaactgagagactcactaccgagtgtatatgggagcgtataacggattgggagatggctcacggaggtgtatatggctgtgagagctcccggctgtccaaaggcatcggttgcctgtagacatcccgtaaagacaccgaggcggtcatatttagtagcgggcgtcaagatgggatcggtggatatcgcccatgacaccaggtctggagatatagcatggccccaggagatattgccccaatcattcccgtgcgggttccattggaagcataaatggtataagcttgtttttgggtcgtatcccaatccatttgggtcattcatccatcctgctggtgccatgacatggaatgatggtctccattgtgaaggattacgaagcgatttctcttcatgagataggccattaacttcatgggttaatccgtgcatttcgccaataatccactcatctagccgggaatatgagttttacgaggttgctcggattcgcacaccttaaaacataggaaatcttgaacgagtccggtcttcaagacgattcgggggttaatcgggaataggttcggtgtaaggaggattgtcggcgaaatgcaatatatagatcaatataaatcaatgcaaatcaaaacaagtctatacaaagcatcagagtatataatgcgatagtcagacgggtttctgatctgaatatatgcaatgaagatgcattccctcgagtcgcaatgggagatctcggagaaacttcccctaataaatccggggagtttaggattttggggaatccggggaactccctttcttcaacatacaacttgagccttatggaagtgtgtcttccaaggattggctcacacaatctgcatgtctttcaagtgtggctcgactgagactcaagtcgactactcgaactcgggcgcgcggaagtcgcacgcggtcaatgtccagttaattttcgcctgtacagtgttcggtgccgcatcattcttgtacggattcgatgacaagattatatccccggttgctgcattgccggattttgtaagtgctcgtttttttcataacacaaaatgttccaagctgattcggagcaggtcgagaaattccaaggacctaacccagtcactgggcagtatgtcctcacggctcgcaatcaaaatctagttttctcccttccattggtggcgtccgtgatcggaggtctgcttgcttcgccactgaatttccaccttggtcgcaaatggcctttgattattgcgtatttcatatctatcggtggcggattgctgcaagtctttgcgccaaatttggggtcctttgtgggaggtcgttctatcaattcggttgctttgggtatcataaatgcaactgcccctttgtatatctccgaggtattgatccctaccgcttgttcaatgttcaatctcgctcattcttacaattaggtggttcccgcctctatacgtggaagatgcgtcagttcaatgaatattttgaatctaaccgctggcgtggtaggtactgtggtggtcttcagaactgaaaagattgaagggaacctatcgtaccagattccaatggctgtacaatgtgctctgcctgtgcttcttctgttcctaacggtgccccttccagaaagcccgcaatggctggtcgggaagggaaatatagaaaacgctcgacgcaacctgcggaaactgcgtgggtccagtgacgacgaggttgaagatgaactccgtctcatgatgctgtctgaagaaaatgagcgcgagatacacgcccagaccaagttctggcacatattccaacgagagcacctcaagcgtaccctcactgcgggctcatttttctctcttaaccaaatatcaggcgtcattctttcaacaacgtatacaaccgtcttcctcacagtactaggggttgcagacgtcttcgccctgacaatcatctcatcctgctgcacattagccggcactatggccgcacccttcgtcatcgaccgtgccggtcgacgtcccacggcattcgtcggaatggggattctgttcgtaatcgacgccgtggctggtggcttagcttttgacaatagcaacaagaaagccactatggccattgccgctttgtccttcgtattcaacttcttctgggcctcttccttcttctcgctgtcaatcctaatgccctccgagatggcaactcccaaactccgccaccacaccatggcctacacgatcgcctgtgcacaaacaaccgccgttatcaccaccctcgttgttccgcagctgacttcggcggatgcagctaaccttggtgcgaagacttatctcgtcttcgctgcctgcatggctgttatcattgtctttttctactttttcatgccggagacgcgtggccggacttttgctgagattgatgagatgtacgcggctaagatccctatgtggaagtggaggtcgtatgagacttcattggagttgagggcccgtgaaaaggatttgtgacagagcctcgattggtttatttttctaattgaagtctgtaaaatatactcgagtaaatactctatgcttttcgcgttgtaccgatcatggatatataaacttgggtatagttgaactcgctatattggtacactgtaaaatctagtgaaacccgatttttccatggcatgagccaaggtataaaaaaagtaaattgtacaaatcgaagacccgttcgtgcaaggaattggaaaatgacgcaggccaagtagcagaaaaaacctccctaagagcctcatcattgcgcccactctggagctttgggttccatgatctgtagcgagcgtaggtgagctctatacttctccaggtaaggatggtttccaccgcggaagctggtcataagtaacaaaaagtcttctgcgagactctgggctgtggaagttgtagttgtcggtattatttcggggaaattgacgggcatgtttaggccaatcccgtaagagggatttgtgttgcataggatgtttgtggcgcagattgcgatatcgtacagcttttcggtctagatgttgagttgttagtaagggataaaggtcagagattacagcaagttacacaccaaaccgataccatgggcttccatggagctcagccgtaatgactggcacagccggagagtggattcagcaacggagacggcatatccgaagcttagctcgggttgttccgaatgggcactcagaaggccgtgggttgaggagaggagccagacacggttctggagccatttctgggtgataaaaacgtccgctgcttgggtctctcgtaggcccatggcaaatgtgacatttctgctttcgcggccttccttggctcgctcgaaccagtcatagccgcgatatcgttcggcttggttgactcgattgagattttggtggatggagagtgccttgactgcggtcagtctctggcagtacccgttgctaccatcacatcggcggttccagcagtcgatgacatcttcgtcgatggcatcgaatagttccatcattcgtgcgagacccatcattccctcggcatccttctcgttgtggaccacaattccagagacgacgctatgcgtggcgctgtggatgaagtcatgcactgaccgcatagtgaatccgggcttcccccagaaggttattggatgtcgccgttgcaaagcataggctctgaagtttatggtcagcgagttgattttgaacagggctagtcactttgattacctttctgtaatagagaggacgaggtacgttcgcagccgctggcctttctcttccccagacaaatcctgatatgactcgggatcattcaatcccagcgtggccgcaagatctagtgcctcccgtatccggagccatgctgcgttgtgctggttacttccaaacaaacagccaaagaggaagaaactcgttagaacagcttcaatagttggattctcgccaaaatctgaacagcttcgcattttggtcgctgcgttcatcatggctcgtgcttgcagagctcgagatgaggacgtcggccgctcgttgatctcaattggctgtgtgagcgagaatgcacataacgacaagagcatggccccgaactgagagttcttgcgatgctcttgtgtgatcattgaggtgtacagggatgaccggttgagcacgggtatggtcggatgtagccgatcaaagtagacatcgatccaagggattatatttgcttcattgattgtggatggccagattgcgtcggtctcctgggtatctgagcgcatagacctcacggttggtgagaatgccatatttggaccttcctggggtatccctatggccgcagccgcagcatcggggacaggttgaataatagacgggagagatggccggagatatacattacttcctggtaaatcgaagatagggacttgcgcatccagattatccggaagccagtactcgacgtcatttcgatcgttccagctcaggccgctgttgtgagaatctatagatggggtttcctcaccccaggctgccatcggaggaggtatacctgcaggtgccaatccggcgccctctaagggcatcgtggctggaccatgagtgggggccccccaaggtgctctaggtaaagcttgaccagactccaccgatgaggatggagcttgaaattggaagccattcttagactcttgagtaggaatgacagtttgctgctgtcgaatttgcgacacgcgactttgtccctgtcagtgagattattcatagtcacgggccattactcactgcccggttggtccgcgcttcttctgtggttgaaggaatgtacaatcgaagcccatagactcacaggccttgcagggctgtgacaagctacactggggtggtcagttagtacattgactgttcatttaatatatagggggcggtggatatcctaccttgatcttgcgaaatttgcattggtcacatgccctcttggcaataggcgatttatgagatcgaatggggccagtggcagagcctggcgatctaatttccataatataaagataaagctgaatacgaagtagctgcagagctataggctcaggtagagagagattgtcggacataaaatctagtgaggtcgaagggtctgacccacattggcccccttcccctctcctgtttcctctcttttcgctcctcgaacgatcttcacgtcaagaagatcatgaaaaaacccgccaaattaactggggaacggcaagtcccgctgagattggactgaagaaaaaaaccaatcaattcatatatggcatttgaccagaatgtgccacgtctccacttgataagagtggccctcggagtgtagtccgagcagactatattaagctagtcttgacctccgtgaaaatggcaaatgatagcaaaaatgggcagttcacagtcgtgggaagagattgtcgctcacaaaaggctcatcagagaccaacttatcgcaccgtacttagttgatgtagctcaacgtctgccgcaagtacagaaccccgaggagcgtactcggctagaagatcccttgattcagaagataacagatattgacaatgttgccgccctactggaatgcctggggaagggggagttccaagccgaacaggtgatcaaggcatatatccaacggtatgtctgctatcatgtctgctatcggcgttggaattgaccatatactaatatcctcggtagggttgtggttgcacatcaattggtatgtgtctttcatcctcgtccctatttccatcgaccaactcactgatgtaatcttgcatgaatagacaaacagcctgaccgagattcttttcgaagatgccttaggacaggcaaagcagctagacgtcgagtttgcagaaaccggaaagctcaagggtcccctgcatggaatcccgatcacgctgaaagaccaattcaatgtcaaaggcgttgacacgaccttgggatatgtgggcaggtgcttcgcccctgcccaggaagacgcagtgctcgtgcagatcttgaagaacatgggcgctatcgtcatcgcgaagacaaaccttccacagagtatcatggttcgtctgagcatcatcactagctgtatccgattcggagattgacttcatttccagtgggccgaaaccgataatcctctctggggactcacaaccaatcctcgcaatccaatctttacacccggcggctcaagtggcggcgaagccgctttgttgacattgcatggatcgctgttcggattcggaactgatatcggcggaagtataagaatgccacaggctatagtgggattgtatggcttcaaaccaagcgtaaataccaaccgccaggaacaaactgcctatccaacgatatgtgctgataaacttccgaacagagtgccagactcccctatgagggtgtacccgtctccactgaaggtcaagaacatgtcccatcttccatcggcccgatggcccggaatctctcgtctatctgctacatgagccgtctgctagcgaatagtcagccctgggacctcgattcgcgatgcgctcctctcccctggaacgagactgcattccaagaaccccaagaccgacctttggtcatcggcttgattctggatgatggcatagtaaaggtccacccgcctattttgcgcgccctacaagaactctcgacggtgcttaaagcaaatggccacgaggttgtggtctgggatacatctgaccatgcggggtgcattgagatcatggatctcttctacacggtcgacgggggtgaggatattcgtcaggatgtagctgtcgccggcgagccgtttattcctcacgttgaagcactggttaaccgaggcaaggctatctcagtctatgattattggcagttgaacaagcggaaagctgcagtgcaaaagaaatatctggataagtggaatgccgtgcggtccccttcaggtcgtgctgttgacgttctgctaagccctactttgtcgcatacgactgtgcctcatcggaaattccgttgggttggttatactaagatttggaatctgctggattatccggctttgacattcccggtggatagggtgagggctgatctggatgtgttgccctcggagccttatgtcccaagaaacagtgtcgacgagtggaattggaatctgttcgatctgaaacaggcggatggatatccggtgaatctgcagatcatcgggaagaaactccaagaagagaaggtattgggggctgctacagttattgagaagctctggaaaagtcatgtcgacaaatccaattgagctatctaggatttataggcagaatataaagttgggtcaactcgcagactgaatagcgtacatcgccgtggattgcactgatatttggaataaatggtagacgcaactcattatgcagcttgatgggatatctgcctccagagtcacttaaatgacaaacgccgtgggaatatgcaacaaggcaagaactcttgagtctcaagccttgggaggctcgaacaaatctggtttcatgttaatcttgcaaagcttcgccacacagccactcaattgaagtagtgactgcacaccatccagaatacgcatatgcgtgaatccaatctcccgaatgaactccaatttggaatgctcagacaatgtggggatggtcttggtgactcgaaacatggtacttatgatgtcgtgagaggagtaacccagggtcctttagatagatcggttagaaaccagcaccccaaaacaaacaaatttacaacataccatagctcgttcagcccctccagtgccacatccaccttgccttcccaacaagccttgatcatggcctgaactttgatcgggtgcgggctgtcgactactcggaaaacattgtctccgctgacgaaaccgaaaccggaccaagtactctgcaggttgttgatggcctgacgcatgtcgccctctgcactgaaaacaagtgcagcgattccatcctcggagtgctggacattctccgcctcgcaaatctgcatcaaccgtttgaccacctgagcatctgtcagtcgggcataacggagaatggcgcaacgggattgaatgggttcgatgatcttgttcgactggttacaggcaaaggcaaatcgtgtggtggaggaatagatttccatagttcgtcgtagggcttgttgagcaccggcggtcatgctgcggggagacgtgagtccagtgaccagaaggaaactctgacgagaacaaacctatcagcttcatcaaggatgaccaatttatggcgtccttgtggcagggtaaccttcttttgggcaaaacctttgatccgatttcgcaccacatcgatacctagaccacagcatcaatatcgaccaagtcatgagagcgattatgccacaactaacctctctcatcacttgcattcagctccagaactgcctccttgtatgcatctcccagcatttgccgcgccagacataatactgaagtggtctttccaatacccggcatgccagagatgataacgtgtggcatattaccatctttggcaatgatctttaaccgttccactgtttcagtgttgccgacaatatcatcgaggaaggttgggcggtatttctcgaccctattgacaagccaaagattagctctacctgatattgtcaagaaaggaaagcctaccagggaagctcatagtccacaggggcaccggcagtatttgccttagcagcattgcgagaagcagaggaagattcagcttgaaccattgtgagtgatttggtgattccaagtaaagaagagcagtgaaggaaagacgcgaaagaaacgcgtgggaaatgcgataacggcttatcagctggcctgtgcactttgcagatgtgatggcattgatgtatggtgcattgaagctgttattttgagattttatattacagaatctgtaaaagactgagtacggagtagtcaatcgttcgtaggttgactgctgcatacgtagtttagttcaatgctatcgttttcgtgacctgccccccccccccccccccccccccctctttttttttttcctccccccccccccccccccaaacttcattctgcgccattcttcctctcttcgccccaacaacaattattcttaatacctagaagtcggccaatgactccattccttctattttatacactctaataggcacagctcagattaacctactcttcaaaccatccattttcctctctgcgacgctcacagccgctgcatactcagaactccggccaaacccaacggagaagcacaaaccgtggtgtatacagtcatgcaaacatctggtatgatgaatcagacctctgtgcgccgtaacctctttcatgggaacctcagccgccgacctgcttctgtaggaccacctaatggcacagttcctcaaacccacggcggcctttccaatcgtccctcgcaccgactgaagcctacatcctcggactcggggccacatactcgaccattcaaaaatgcggaaaataaagatattgtggttcgggacaagaatggcagctacaagcttgagattccaacattgccgcaggttctggttggagaggacggcgaggagctagctgaacttgcaccagagggtggaagattcaattctttggaactcaatgggcgtgacaaagatagtatgcttttctacacgctgttttcctctgaagcatagtctgctaatattgacacagagtttgaggcagctctcgtggagatgatggttcggcaccggaccagacaatcaaacggtgaacccgatggtaagttacagtcagattgagtccgacagtcctatatgtgatcatatactgatacgaaacagagattctgagtatggtgcaggaaagcctacgcaaaaaggtagcatcactggatgaagacaattggatgtttgagccggagaaggacttggtttctaactagagggctgcgcttgctgcatgcatcctgatctcattacactatcagtcggatatgtttcccgtaaaggcctgcttcaaaagacccacgcacatctggtctctcttaatcaagctccatgctcgatggcggtgcctcaaccttcttcacagctctggattgcgatgctcctctgccacctgtcttgttctgacctcctccgaacaacataccgctcatcatgtccatcaatgggtttccttgccggggaatcttgatggcgaagtactgctcgccaatctgagccagagcatcgtcccagataccaacttctcgaatttgtgctgcatagtgtgcagtgagctgtcggaagagatcggcacttccgcgctggatggccaaaagcaacatggtgatgaagtttaccaaaggaagggcagggaacacccgggcgtcggagctggcactgctgacttcctgcacaccgagctgaggattagccgctgaaagccgcgaagtgaaaataagcaaggctttattcgcgctgcggagatttccggtgaggaggtatgggaaaactgcgcgtgacgcatagatcgctgcggtgtgtggctcatcgttggtgtaccattcatattcgagctttgcgagagtctcggctgattcggaggttcctagaatgagatgtttctcggcatcgtatggctcgttatctgaggcattagattagtatgcaccaaacattgcgctccgacatcacttaccttcggcgtatactgaaccaacagcatgatgtaaatcggcatctcctcgttccagtggtccgaactttgcactccatccaattatttcttggatgaacctctttcgtgtaggttcatctgacgggaattcgcgtagcaactcgatcaggcgctctgaagaacaaagatatacaagttagcaatgttaggcctgtaatagctactggggtaacctgaagcaccaagctgcagtaatcaaccccagtagtaaaaagatacttgatagactcactcttccgagcccgaccctctgcatcatcattaccgcctgagatctcccattcggctttgttgtatacttcaagcaccaacatgatggccaagtccccaccactggccgaggcaccctgccgagaaccagctttcaatagctccttcgcgccaccagccaggatctccgctgcagcatcgtagttggactgcttgatataccgggcagcaataacacgtagttgttggtgagcttcgtagtaggcgccatcagcaatcctacagacaacgacataagtcagaaccagatcttttgaagtccaaggtgattatggattctcacttttctcgctggcgggcgatgaccttatcaatccgggatgacatggtcgactagaaggaggcgccgagggattatatcaaagaaaagtagaatcgaggaccctatcaagcagagtgcgcaatgcaagaacgttcgcgaggagttggttgagatttggtggggacacggcagttcgcccagggccctggagaacatgacatctccgtcatctcctcagaaataccttatggttgctttgtagctgaaactgcttttgtttttacgtggaatctgctatttctactatttggactctgttcgttttattgaccccttgtttccggcgatattacgatgataccacgccattacggacatccctaacgactatacagctacctagctagtcgcgacaatccatatcaaggaccaagcaatcgctcttcttgattcagccatgtccatcacccaatagtgcgccaaattcatcatgaaccggtccacattcaatatccagcccctgcaccgcttccacagcgcaaatacctctatccggagaccgagggtaagccaaagacctagtgctatgtcaaacaaatgaaaatgaatcgctcacctgctgctaggaaatcgcttgcttctcttatgatgaaaatcgtcgtttttcgctgggcgattcgtccatggcctactactacacgccggctctccctgcagacctgaatataggctatgagacattccagaagctcaatgatgtcccggatgagcacttagatgctttacttgatacccttgttgctcatgagaaagaaacagagaagaagtgcgatgtagacatcgtcacatggagaggaatgatgaccaaggtgtgttgaattgaagtctatcgcggactatcatctggtttggaaccaaattcttacctctatttgcagattctcaccgctccctttgataatatgaatgggtttgtaaccatgatatattccaaacatagcgtgctgtctctctaaccccaggctatctctagcttcgagatgaatgcaacttgtttccaggtacgatatcagtctcaacaagattttccagattccatgatctaacatctatcaaagggtaccatgtgtgtatacctagctagcaagttcacaatataaggtgttgacttgttctagattcattgaggaaaacaacgaatacaaaaaccaacagaaagagatccaacgcaagcgaggatcgccacctggaatggcaccacaggaactcatgatgtattggggtgtgtcaaacaacccatggaaatgtgtatagactaacaaccctaggctataaattcgaaaagctggctgtacttccgaagacgtgggatgaatcaacccgtgaagagatcgaaggccgccagaacgaagtcgtcaacaatgcagcacagtattgctcggttgtccgcactgggatcggtaacgtgcgtatgattcttggtggagaggttgatgccagtatgtttaccttgattctcgtggctatacctaaatctaacttatgttctagtctgggacagcaagccatcgcgaaaagaaagccccatcaactgggttgagctgaagacatcagctcagatctgcaatgaacgtgatatgatcaagtatgagcggaaattgctcaagttttgggcacagtcattcctgctcggtgtgcctaagattattgtgggattccgtgatgagaatggtatttgccatagcttggaggagctagatacagctagcatacccgggaaagtgttgagcgtcggccggcgttcttgggatggaaacgtctgcatcaattttactggtgcattcttggagtgtgagtgttctttttcgtgaagtcatagcagcactgacacacctcccagggctgaagcagactatcaaccaggaagggacgtggagaattcggaagaaggaaaaatctccggtcatcgaggtctatcaggttgaggagcaaggacatggcgatattatctcacctgctttcaaggcctggcggtcgaccacgaccaatgcgagttcgtgattggaaggtctaatgtatgatagtcagtactaatgtatttcattgcttgagtctcattgcaataaatgaaatattgcacaggcacatccattgaccttacgaggcgagcggctgtccaagggatcccccaagcgactacctgcacctgagctttacacggaagattttccctggctgttgaaatagcagaagacttttgggtatttctatgtccttaaatatctttgactatgcaatgcgatagctcatgacccaggttcggtttcaggggcctgaatcccctgagcttccaattccttctttcggaaatattcatctcgctgtgccctcttcctcgcagacttgagtccccttttatgctgatgactatttaaatgaatatgccactggtcctcggatgccattgtcttctggcagacgtcacaggtgtagcacttcccgatagggtctgcctgcacacgcttttcctgggcttccttcgcgctgaactccgccgttgctaactgagaaagcgatttgggatcgggggtcagcttattttgctgcatcagttgcataatctcttcggacggctcagtgatgcacttgctccagtcgctgacattggaactgtctaggagataaagacgacgtgtctctccgacttctgtgagtgcttgccagagtttattgcggatccatttgacctgcgatgttccgtactgtcgtgtggcgatccgaattaattcaagagagtttcgtttgagatcttcgatttctttctcgcttgcttccccgtcccggatagccttgaagtatggcgccaattccttgaatccaatggacacccagactccccgtgtttggtcaacttcaattccctgcgaggctttctcctgcaagtagttcgacatcttctccgcctcggtcatcaagccctgcttgaccatgtcatcgacgcgcgcatccaggcgtgcgttgaggacctccttctcggcatggacccaaaataccaatgtattctcgaaccgtagcagcccttcctcctggtctatcgcctttctcttttgagagaattgctctttataaatctccgatgctcgccgccctgtctgaaaatagatttctaatgaccgccggattttccgtgcatctctcgggtgccatcgcgcagccataacgggatccacctcgcgcagcttctccaagacaacttcaggcgacgaatccagaatcggccatttattcgaggttgtgctaaactccatgagctgttcccgctcgccttcgtcgtccaccccctcgcccacaagctgttctttgaacagcactgcttgggtataatagtgggtgccaccaacaagaatggggaccttgccacgggcgtggatgtcttcaatgactctcagggcttctcgtttgaacagtcctatgcgccatgcttccgcgtctaagtcgatacaactgaggaggtgatgagggataccgttccgttcctctatcgggatctggttcgttatgatcggcaaaccgcggtacatctgcattgcgtcgccattgatgatttcaccattgaatcgagaggccaagtccactgcaagctgtctacagctatcagtcattgtgttcggaggaagttttggaggtacctggagtcattacctttgacttgcctgtgcctgtggcgcccacgacagctatcagcggattcatgattgtttgaccgtgccaaatagatctgagagccgacagcataccgcgatgctccttgcaacgacgtgggggaaaaagttgttatcggttatcaagcgggttacctcagccatggcgtccccaacccctcagggtcgtctcatcttacaatgagctaacatcaaagcagtctagataagtctggattgataaccttgtctgcttcatttttatctccttcttctcaaacttgtcgagtttgcttttttctcagtgcttttttttctcacacattcgtcatggcggataccaattccactcccccatccattgaggtacaaaacctctcgtacaagttccaagatggctccagtggcctggagaacgtaagcatgagcttaccagctggaagccgcaccctattgatcggcggtaagtcaaatccatttccatttcagactaatcttgacgactaaccaaaacacagcaaatggagcggggaaaaccaccctcctccgcctcctatcagggaagcgccttgcacccaataacaccatcgccattggtggtaaggaccccttcaaggacagcctagacggcgtaacctatctgggagtcgagtgggtgttgaacagcatcgtccgcacggacatcgatgtgccgacgcttctcgcctctgtcggtggaaatgcttatccagagcgccgggacgagctgatcgatatcctcgatgtcgatctgcgctggcgtatgcatgccgtctcggatggagaacgccgccgcgtgcagctggccatgggcttgctgcggccgtggcaggttctactgctcgacgagatcactgtcgacttggaccttttgtccaggagcaatttcttagctttcctaaagcgagagactgagacccgcgcctgcactattgtttatgctacccatatcttggataacctcgcccagtggcctacccatttggcccacatgcacttgggcaaggtcaaggcgctgggtagtgttgagtcgttccatgaggaagttcccgcgtggacttcggagaatagtcgtcttggagagctggttcttaagtggctcaaggaggatatgcaggccagaggtccccggaatgatcgcggtaatcaggccaagacctaccagtcccttgagggtattggaggttacggactggaaaaacacgactgaggagaaagatattgatcttttcttatttttcccgttttctttcctgtttttttctttttttttttgcatgctagcactgatgtcgggagtcatgtaacgtgccattcaacaacaattcggttcaaccacaaggcatacacggggttataggttggcatctgcatctacagggtctattcaacatttgggagttttcaacatcacaactcaggctagagatatgtttctttctatacaaatcatgagagtatgtccgagaatatatacgtgtggacatagtcctcacttggtagttctaactgatccctgatctatgatatcgagtcatgagatataaaataggtacaagcatacctataatctaaatatgaagttggtctaacaagataccatagacgttctgtactttgattccactttgttttcgtagatgtcttcgcaaatgccttccaaaatgtttgaatagacctcgtaaagccatagattgtgtgtttgcctgccacatcagaatgtgaaggcggtcatgatctctttatatctttctctccttcctctatctgtctcttctatttctattctctctctctctctctccctcgcacacacaccccccaagaccagaacaaccccggaccctctcaaggccggcttctttgcattttgtcttctcttatttcagggaagtcacaatgcctgacaagggcaaaaaaagagtagcagtaagtgaaaccaagtcgcaaggtttttgtcacgttgaaccttgttgaagcgtctgtttatcccctaccaaaggaggtaatgtcgacatagactgactaattgaaaaatagcaatggtgcacattttgtgagatagaaggccacacccaggaggagtgccatcgctgggctgcctgtctgagagacacggccatggccaataacatctccatgatggcagcatacaagccctcccaggtaaagccaccctataggacattctaggagtcatcttattaatgagtctttggtagaatcagaagaccaacccccacaagaagactcatcgtagctaccgtggtggtcaaaatcgcacaggtatgtaatcttcatacacccaaccctatcttgggcttgattccttggaatatgtggtttgccttgcaatcgcccttgaaacaagcgaaatcagtcatttgacaccacttgattagtggatggcatcaagaaccatcgagacatgtcctaacaatgcgtacttagcccgcaacaacctccctcctcgcccttcttccttcgcccagtctggtatgtgaaccttctcaatttataaaatccggttcctttctatatacctccgagcatcgtttttctggtttgagctgtaggctcgtcctgcggttgtattctatgggttcggcttataggtttagcctaagtattcggcctgtacctgctactgagatgatctgtcagttcaacgttacgatgtttgaattgtgcatttatagctcaaccccacccccaacatctatagggcttactctaaatattgttcaaaggacatatgctaacttgtaggtgattctagtgggcaccattaccgctactcggggtagctctagcgtggagcctgacctgctttcgatattagtgcaggtctctcggtccgaatcagagcttctccttcggttcctagagaaaattaggggagatggaagcgccgacttcgtagagaatctcttgattggggacgaaccaaaacaggaggaaaccacccagggcccctgtaaagaatctggtagtgatgaggtcaagaaggaggcttagtttctcaacggcatacgatgttcttttttcaccttggagtaatttaatgaccctgcatgatgttccttcacttcccacgtacaacaacatatatttcgatagttttgtacgaattgtacattggtttgcgtctgatattaaatagacatttacagacatctcaaaggatctcaaaggattaccgaagggacatctatctacaaagacattaaaaggatatctcaaccatcatgactcataaagggcggctgcctaggtaaaactatcttggttctcgtataaatcatgagagcatgttcgagatagcatatatccgtgtggacgtgtcttcacttgccaccgccaattcgaatcgatctctgctatcctctgcagccggcactggtcgccatgataattgagtaatcgtctttgagggcgagacctctttgtcaatggtcacgacgtgctgtgcttcgagggtatcagcagcactccggtggatggagatgacaccattatcctcgccgacagcaataacgtatgtgcctttgtatattatgggcaagaaagcaatttctgagacggccgatgtcagggccacggtcgttttgcaaacgaaagtgtcttcagacttttgccagatcttcacagatttgtcacgtcctgccgtagcaaagacatagtctgttgtagctggggcccaggccgcacctaggatcattcgagagtgacccttagggttcaagctgaagtttgtaaaggtagttgggtctgtatcgctccgctggaagaccgcccattggcgatctcgtccaacactgagaagataacgatcgtcactcgagaatgagaggtccgtgatggttaacgagtgcgcagtgagagaaggcttgatctcatgccagtctgacgtatcgtagaggcgaattaccgcatggtcaatcgagctggccttgcaggcagtagcaatgagcctacggtcatggcttactgccactgctgatatctcataaccatggccatagagcttttcatgctccggccacaaggtgtaacgagacaactggtcctccagcggcgggtggttggcagctagcaaggcagaggcgactggcgcctcagttggggctttttccccgtcctcttccactggtgcctcatctccaagtgccttgttcgaaagacccagcactggaatctcagcagtgtctgggaggtcctgatcattcgattgtttgaacccagtgagtctctcgagcaactgagcaatttgtttgggctcgttgaacacacgcaagagcttctcctctgcaccagtcacgaactgtgagggacccagagtatcgacacagttcaaatcgtacccatgaatctgagggcgggaaaattcatgccatgaacctgtatttccccgtacccactttgcatgaagccgcgtggtttggtctgaactcgttgaaagcaggtagcctccagtgggctcccattgtaaaccgtttgcggagcgcacatgacccgaaataccaaacctctgtacccaaatatccgagtcggactcaagtcgccaaactctccaacttcctgtccggccaagacttaccacctgcctcccatctggtgaccagagcccaatccagaagccacctgcactaccagtcgccgtggtagatcctttttggacactgatctctcccattctctctgtggacatccagacgcctgatgcttggtcttgttcccaaattgtgatggtattatcagccgatgccgaaagaagttgctgccgcttcgaatcaggattccacgcaatagtataaatccaatcttcatgcccaaagagaagagcctcgaaagtaattgagtatttcgatcctgcagcctcaaactcatgggctttgttcgatagcgtaggctccattcctccaagcagaggatctgtatcgtctattggagcaggtacacttgcttcaccccgacgaagtcgccagagacggatgtatctgtcttgacttgcagacgctagcaggatatcgccgttgctctgcttgtcctgagtgaacgcaagagccttaatccaggcttcatgtcccccaagtacggcccgatgcttgaattctggcttgccgatggaggtttccgagacgtaaatatgaaccttggtcgttgtacctgcaacggccaacaccaatggcttgtccgagtcgccttcaagtccctgcaatgatagagatagtgggaagaaccttggtaccattgtgatcatttcaagtagctcgcatttcaacccatcctgtgcatttattctccaggtccggaccgtcccatcagccgctccagatgcgatgatatccgttccatcggcgacagcaatcgcattcacggagcccgtgtgaccctcaagggtagatgcaagtacatagttgtggggatcggcatcgtcttttttccatacccgtattgtgcggtcgacggagccggtgacgataaatctcgttcctgaggcggggcatgtataaaatcgaacgacgctgactttgtcggtatggcccacaagcagagcatggatgccacgatcattcttgtccttggttaagtgtcagcttgtcgttatcaatgcgcaattgttctcaatagacctactagaggatcccataaggcgacattgttgtccgcaccgaaggcgagcaagcctgtctgcgcatcccaatccgcggcaccagggtgccggtttccccccacgctgatatattctgtgtcgacggcgaccatagagtactatgagggcttatgaaccctttgtctgtctgtgctgctgtactgggggaatcaattggaggaaagccgcaaagaaattgcgggaaaattggggcttatcgataagaggtgtctccgcctagcccctccatcttctcaacagactcgacttgtgatctctttacattcttctcaataagcagagataactcctatatgctctatattcaccttcgtctacaacgccatggctgatacttcaaatgcggaccagggagagttccccatctctatcaccgtcgagtttacgtacgtcaaatctttccttcaattgatcaagctctgctgataattgattcttcgatagcggcggcttagaattgctattcggaaatgagcgtaagcataaggttgttctgcctgctcgtttagaggacggcagccggccaaacatctcatacctgcttaaatacctggtcaacaacctcatgaaggatcaaaggatagacatgttcatcatggaggacaatgtgtatgtcaacataacttcgggggttgaacagtattaatggttcgacagacgaccaggaattctcgtcctcatcaacgatgccgattgggaactcgaaggcgaagagacatatgaacttcaacaaggagataacattgtttttgtctcaactttacatggcggttaaacatgattgattgtattgatattatcaacgcaattaagacaaaaaaaaacttgattcgaagtgggctggaagaatgtgagggcaacataaagcgtggacttttacctagaccacatcttcaacatgctgttgtgagatccgttcgcgctcacgcggtgttcggattccactgggtgttcgatgaccactctgtggggttacttgaccatctgggctaccaagcccttgcgccggtgataccaccccacttgggggcactgggatcttcaaatcctctggagaggccgggataatctcttcggggaggtcggggatatggattcgctgtgcctcgttctgatagctctcgggaaggatctgcaatagtgtcaattaaccatagatattaatccaacccaaagtccaatttacctcaatgatctcatcgcgagggaattcaaggaacggaatgtctgcagcattgcaggccatgagatagccatacaaaaccctcaagacactctcgtgtgcaatgatgagcagatcggtttgctccctctccaattcaagaataattggctcgaggcgaacagccaagtcatgataggactagtgcaaatggtcagcagttacacactttgagggggggttggtcaaggcctacctctgcccgtggataacggtggtggtagggatcaagctcgtgcttagcaacctcgtcaccaaactctgctcggatacgatcctcagacatcttctcacaaacaccagggttcagttggctcaattgggacctctgtcggactttatatccgttttcatggaagtactttgcggtttccactgttctgcggcgtgtggaagtccaaaccttcaagggccttgactcatagccagtctctcctcgttcaatcattgcttgcttttcttcttcccggtgagctagaagacgtgccgtcattttcttggcgtagtcttccccctgatccgatagcgaagtatcggctttgtatgaacctgcgtctagcgaaacgccagcctaggtaaaatgtcaggatttttgcatcgtacaatatggactgtaggtgacctacccgagcgaagtacgtgcgtctcgatttgatatggagatttagaagatagaagacgatacggttagagagataaccgaagcttcgattgttgacaatcaatctctcgccggcattgatcatctgtatttgggtgagtaatgggaataggaaagaatcaattgcgcgtaccttgataaagttcaagtccttttcctccatggtctggaattgggggatccgagaatagatacggttcaagtaatgcttcacggcatcttctgatttccacgagacgtactagcatagtttgtcagtttccattcaatgccaatatatacatgagactcacatcaggggaggagatcttgactctgcgaacattctcttcaatgatgcgttcgtcgtcacaccacgactcaatgaacagggtctggtaaaagataattagtctattgtcaaagattcaaatgatcaactctgacttgcctcgatatcatgcttcgcaaactccttggcaagcgagcgccgtcctgagactagcgggttgacggcatcatatatcgctatttgaccattttcatgattcaaaaagtgatagatgtcttctcggcattttctcacaatcttttggcgtagaaggacggacttggcagtcgctaaacggaaatgtcaatatggtcattcaggtagctcaggataccatgcctaccattgacatagaaataatcatctggcatgtcctcgccaaatggaattgtggcacgacggtagtcgcctagatggaagattctggttttgacaccaagcctatcaatgcatcagcatacctgtaaatgcgcaaatcacaggagtaaggcataccatcgcaggtatcgtgccaaagctactgagatatgtctgtcatagagttgtaattagttcaccgcgcaacactaatctcaatgttaagaagtttcatacgttttgcctctggcaggcaagccgacggtaatgatcacaatgcggcccgaatggaaaagccgaccagattcggtgctgtacagctgggccggagccaaatccgccttttccggcaagtcatgaattgcatcgacaaagattgaggacttgcgacggaatcgtggggagttggccacaatctcagcggtgctatatgatgtcagttcaaatccacatcaggctacactcttcggccagggtatggctcgtgctttctcttcttcttttctcctttttcctgacattattgtcaagcaaaaagcacacacaagacaacatttcaactctcatggagaagacatgagattgggaagagggaaaggcaggcttacagtaaagtgtccatggtgggatgtcgaggtggcgcaaccttgagatgttgagatatcacaagattcagtatccagcgtgtcaggggtatcgatcgatagctctgagagagaccagatattcctagtcacgtcagccgatggcaagacagtgaagggagcgagaaacaaggaacaaggaaggtacctgagaggcggtataggtaatcgattaaggctcagataactatcaggtgcagctcatgggcttttatttgcctcgtttttcaggctgcaatatgcaaagtgatgcaagcacaattccacaccaaatagaatggaaaagaaagaagcacactgcaaagatcaattgatatcaggtcaaatccccccaatccttcccaatccctccggtcttgcctgaaccgggagagcccgaagcagcttatgtaatatcccggtgaacggcagcaaccaaagacgccgaggcaggtgactagcatttttcacagcttagaagtcttgaattgcttctcctacactcccgagcgcatcagatccagccctttttactctattttatcaaggtcatctgagacgtttgttcgtcccagatcctcgggctggtctcaatcccttttattctctattcttttgtgttttcccccgagtctcaattgagaccgagtaacacgcgtgacgacacctaattattcgtcaattatcagatttcaaccaaaatggccgattacctatcatctctctcctttctcacagagaaccctgccgctgcggctattaacgatgcatactcctcgttctccgaccgaagggccttgctcaacctacccaaccccggcactgtcgataacctggccagggaagtgcagaaggatgttctattgaccaacttcatgttctccggtctccgggcagacctgaccaaggtcttcggcatgtcccctcttttccgtgtgtcgcatgccttctctatgggctcaaccggcaatctgcctccatatgctttctccgccatgtacggaagccccagggtaaggacaactattccatgcgatgccgatcaccacaaatatcagtatttaacatatcgtcccccgataggtgtttatgcagggtaactacggaagtgacggtgccctcgccgccgtcgccaactaccgctggaaccaggcccttgtcaccaagaccaatgctcagatcatgaacggcggtagccagggcttggtccagatagataacgactacactggccgtgacttctccgcgtccctcaaggccttcaacccctctctcctcgagggtggtctcaccggtatcttcgtcggcagctacttgcagtccatcacccccagcctcgctcttggtttcgaggctatctggcaacgccaggccatcaccgctcgccccgagacagctctgtcctactccgccaagtataagggtgaggactggattggtaccgctcagctccaggcccagggcactttcaacgccacttactggcgcaagctgtccgagcgtgttgaggctggtattgacatgaacctccaactccaaccctctcccgctactcttatgatgggtggtccttctcgtgacggtaccactgccattggtgccaagtacgacttccgtgcgtcttcgttccgcgcccaggttgacagcaccggcaaggtcagctgtctccttgagaagcgtattgctatgcccatctctctctccttcgctggtgagatcgaccaggccaaggtaagcgacatatcttttttaaattcctattgatgtcaatgctaattatcttcttttctttctagcaaacggccaagctcggtcttgctgtctcccttgagcttgctggtgaggatgtcatggagcagcaggacaaggttgaccctgctaccatgatccctcctcccttctaaatctctcctctcgcatcgcccgagataataaccctttcaccccccatgttttagtagttcttcactctcatgtctgaaatgacatatgtttgtctctcttcctcggtatatcctcttgaatttgggttgctggtgcaggtggccagttgtttggcgccctggagattccaacgttttttttgtatagattcacactccggttctttgatttccttttccattaccacctgatgctgcatctctgtttggcctgtggtctgatatcttgtgtctccttgctatctttccagttcatttccttgcatggccatgttttgggtctatgggattgccaggcctgggatgcatggctgcgcctgcagatagctctggttatgtttttcgcatcatagaggggccaatgtaaaacaagttttgatttagttgagtttggttaagttgagtcaattgtaatgatttcattgtgaagtgtttcttgctaaggatgtccatggtgcggtcaactctttgtccatgtggatcaatgtatactccgtagtgaactatgcgttggcattgccaaaaatcagaccattcaacatctatattgatctttctttgaaggaattttcaattatttctcataactaaagacaaagctgtacttcgtactttatccgcagatatcaaacaagacacaaagcggagaggaaaatagtcccggataatgcccgcatacacccaaagcggtgaccgggacgaacgatggcattttccaagacaaatcagacgaatccatccaacatcgctccactatatgcagtgggcactggagcacctcctgcaattggtagacgactccggagtgcagcagtggccttatgcatctcctagaatgggaaccgtctctgctttcttctccacttcattatgggactaagtttctcgataaagtgggttcgtttatatgttgggtctcccatgtttcgctctcgaaaatgatacggagggttattgtggggtgtttgtcctggaatagaaaatgaggtacggtgcagacgagatttaggcacggtgtgctatggcactttcgctcccatatgacatgtgggatcttcagccacttactccatattccagcccgatggcagtcgtagatgggccatacgcacccagttccctgcttggagtgtggctgggttggagtgctgcctcgctattggaagtcccgcggttgatagtcgttcagacgctaattatctgactccagtgacatcatattccccgttccaccctctttttagggctttgtcctttttttgaacttggcggttgccctatgtagaagggactggccagtcatcttcgaggccggatatgcacctaaggatgtatgttccggataaatggctgaccccgggaataatcttctaggcgaatcagaattgaaagcagaatgaaatgaaaaaaattgaaaaggaagagaaaggaaattacagtttagagggggtccgagtgtgtcggcccaattgacaggcttagttttggtaatacacaacataggacatgctgttctcaataatatgatttctggaaatgaatgtgggtagcgtgtccacaagacacattcattcccctgaggttcattggtaggttgggcgatttagaattgtatttcgttctaccggtacggagtaccatggaggtcttgcccagggttgtataccttggcatgtaaacgatacttgttcctcggccggagaatcatgtaatcatacagtaactaactatgatatctactaaggttcttctatgttggaatatgaatatgaatagacgcaatgtgtgcttttcaacagatcggtagatttagatcgtcatgaacccgtagcgtggaagactggatccaatttggagattgaaccaatagcctctaggatgattcgcataattgcttgaatcttgggtacgatgtacaccgtaagtatcactttcaacctggaagacgccaagtgctattcgtacatcttatatctcattatacttagcctgcgatatcacccacgtgtctgatagagacctcgaatggaatgccgttccttgcttccatgctttcatgatctgtacatgccgacggtgcactattgggctggcattccgacggtttcctcccatgcatatgcattgacattttaaacatcatgccagtgccgggaggtgttgcttttgccaggaacacacccgattctcatcccgggtccgtgaaacaatagtgctactggtatgcacattgtgcaattttatacattggatacattgtcggggatgtatacggtggatatggacgtccaagggtctatgatgtgtgggttcccaggctgggtcagtattggatattgaatggaatccactatccttaaaaggtaagcagttcgatccattgctgattgatattgagtagcgtcagcaaatggctgggcatcttgttagccgagacccgatggacatatcggaatcccgagtgtacacctgcagtcgtggtaccgatgcatggttctggatatttcaggttgacggcgtcagacccctgctgatggggcgtcaaattctgttttgcctcgtgtcaagcagattaactaatgtcgcatgacaagttgaactgtggcgattcggatccgtcagccatggtcacctgctctcggtctggtgacgtcgatgaggggaagctatagtttaaatttacggagtagatggcgagaatgtagatatttctttggaatgctaagatatgacaaatgatcttgctgggcgaatttgctgagcatctatagagttaggggaagagaatactataactattgtatatggtagttgatcataaataataaatgcgttgccaatcaaatccaaatgtcacgctcaaataccagtaaataccaatacaatacaatacaatacaccaggtaagctcctcaacgttaaccgtttaagcctggtgcatccctacggagttcagtcctctttagtacctgagctggtgccaggaaccaacattcctccccccttcatcagaaggtttctttttcccacttaatacctgaattcataatttattgtctttctgatacatctcattctgcctgccggtccagatctttggtacaagagactgcatggacgggactacggctggaatcccaacgatggcgtcggctgagatagcttcgactcacatgccaaggaacccctgcaccaatgcacttgatagcatcgagatccctcgaaagaatggaagtgcaacgggagcccctttcaattccgatggattatccgggccgaagagctgtgactattgtatatggctttccaaccgctcggtctggatcccaattaccggtgtgttaattattattatttttctcggaatgtccctgttatgcagcgacacagatagaaagccaaaaatgatttagctagtctgtcgttagtagtatactagtcgatattattagttatagaagctggaataactagtgcctccagctcccattgtcgctggggccgtctctcggcccaagctccttttttttcgaggtcagctggtctcgtgatagcaaagaccgcttacagtacagtaatggccaataacggtggttccagggaaaatcaccgttgggtcacccgacatcctgtttcttttgtatgggatgttaggggtgttaggctataaacagattgagtctgtccatgatactatgtatagctcgttatattcccactaccccggagactccgctttctccaaagtcttttctttggttttacggtatggtaattacgccatcacgtatgatatcatctcccgacgtggaaatacggtcagtgacaatactatactgtaaggaataatcgagaattgcatcttgattcgagataatagtgactggtaaatagtggtagttcaatagtgattaactacatgtatatgtatgctatgtatgtaacttataaaacacaaaaaaaaaaaaaccaactcccattacctgagaaagttggatttcaacttgaccttgtagctctcccgcccctctctttttcctcttttcccctcccgaattgctcaaaccccaagacaattggctttgatcgtgaatcctccctcctgaatttgtttctttcacacaactcaagaatcagatccaaaaaaaaaaaaaacacgtgaaaaaggaccagaaagaaaggaactccattccatcaacgtcacctttcttttggccctgaacccgccccaattttacctaaccttccctagtctaacccgtcttatttcactcgattcgacttcattggttgaacattctctacgcaaagttgcccaccttctcctctctcattcttcttcctcttccctacttttactacattcttggctcccgggtgtgccattttgcttcctttcccatcggtccttccgcccctccctactccaccccggtttaccacccaaaacggtcttctccccttcacatctctatctatcgccgcgatgtcacaaaatcgacccggattgttcccgactttgcgcatgggtggtaagatatatcaatcgcctttttaatcgggagacaactgaccgcgtccagaggtcatccgggagaaggtccaggatggactgactggcgaatccaaggagatctcctacacccagtgcaagatcgtgggcaatggctccttcggtgtcgtgtttcagaccaagatggctccgagcggggaagatgctgccatcaagagagtcctccaggataagcggttcaaggtaaatcaaatcggcttctctcactctggagacctctctctgtgtgtgtgtgtgttggactaaccccagtctctcgcagaaccgtgagctgcagatcatgcggatcgtgcgccatcctaacatcgtcgaactcaaagccttttactactccaatggcgacagggtatgtgtctcctgggtgtcccgcccgatcgtcttcccgtcccccgttccccgttccccgtgggctgaccgtgcccccgatctccccctcaaatagaaagatgaagtctaccttaacctcgtcctcgagtatgtgcccgagaccgtgtaccgcgcatcgcgttacttcaacaaactcaagactaccatgcccatgctagaggtcaagctttacatctaccaactgttccggtcgctggcctacatccactcacagggtatctgccaccgggatatcaagcctcagaacctccttttagatcccgccacgggtattctgaagctctgcgatttcggatccgctaagattctgatcgaaaacgagcccaacgtgtcatacatctgctctcgctactaccgggcgcccgaattaatctttggcgcgaccaactacacaacaaagattggtgaatatcccttttgtctgcccaaaaccatattgagttctaaccattactgtcctagatgtttggtccactggttgtgtgatggcggaattgatgcttggacagcccctcttccccggtgaatcgggcattgaccagctggtggaaatcatcaaggttttgggcaccccaactcgagaacaaatccgcaccatgaaccccaactatatggagcacaagttccctcaaatcaagccccatcccttcaacaaggtattttatgacccccgtacccccggtccgtaatggtgctgaccgtactaggttttccgtaaggcgccacccgaggctattgacctcatctccgcccttctggaatacaccccgacacaacggttgtccgcggtggaagccatgtgccaccccttcttcgatgagctccgcgaccccaacactcggctaccggactcgcgccaccacaacaacccccctaaggatctccccgcccttttcgatttctcacaacatggtacaatctcccgccctctctagacacaacccccactaatccaccatctagaactttcgattgccgctgaactcaacgcccagatgattccccctcacgctcgcccagccctcgaagctcgcggcctcggcctcgataccttcaaaccccttaccaaggaggagatgcttgcacaccttgattgagttgaccagagagtgtcctccgccctccgcgagggatacgtatgttcgttgtgccgccatctgcactttgcgtgagattcgacctgccaaccaagttccatgatctcgggtaagctctgaattgagattgcactgccttgtcttttttttctttttcgtcggggactcggtatgcctccgccccggacatggtggatccttggaactggaatgagcagggaatggtatgagatgggaaaagtgcatcctttaatggctgggaagcggaaaccatgtttcttcggggtggtaaaggttgatggttttcacgcaatgggaggtcatggcctggagtttattttgaggtgtctgagacagctctcgggaggaaaaagtgataccctttctgtgcacgtctgcctttgggggtcggacactgcatagtttcatcggtcgaggggaagaacctccagacgcagcaagtcgatctcgcctccggaggggtgaatcttcccacaaatgcatcggagatcttgaagatttctttggatacacgcacgtttagggaggacccttctatggtcaatctctcgtcttgcagcgctagaatccccgttcgttcttccctttgcgtccttgctttcttttttttttgttcgcaatatccttgtatcagattcatcgggctcggctggttccccggtcctccgacttaccggccatgagctatatgtcattccagttctcaagcagacaattttctttttctttggggtaatgcgtaaagaatcaataggatttgaacggtgtaattttctagtatgtgaggaatattcaattatcctacattgtctaatacctatgtagtgacctagtagtgtcgttcgttacatgtctggtccgttgagatacttcccgcaggggcaccgggtccggaacttcaatttccccttccgagctccccattcacctcaagctagctgtcaccctcgttttctacttccccagaatcactgtctctacgatagcaatctggtattacactggctcattggattgattccagaacataatggccgaaaacgaccgacgaaaccagggctacaggggtgggcgcaaacgtcgctacagaggtgagaacatgaatctaagcttcccaaacaacacgctaacttggctgtaattcttacagatgatgatgactttgatcgccgcccccaaagacgcagatatgaagagccattgttcgtccaggtgcgacggcagttgttgaccatcgcggaatcggtacgcgcctcgtttttttttttttttccgccgcgcgcattgcgctctacaaatggtggatatgaactaacgcttatgtctcattaataggctgctcgcagagcagaagatgacgtccagggtattgcgaagacagtcacggataactacgacgacgaggagatccgccgcgactttgtcaacatctcccttgatctgtacgtgtcggtgtactcaaccacttcggagtattactaacttggatatctgcagcgttctcgaacaacccatgaaaattccttttatcgccggcacggtcctggtcgcacatggtctcaagcctgagcttggatccgaggttttgagcaaggcagctgaggccttgcagaagtatatcgacattggcgcatggcgtgaagtcaagcttcttattcgctttctgggtattctccagccagtctatgagggtgatggcatcttccctcttctggaagagctgttcgctcgtgcagtcgatcttcagactgcctcttcggaagatgtaagttgggattaatcgacctgtgatgtgaacctcatctaacagcttctagcttcttggccttgaattggtaaagatcattcagttcaccattccttatgtcatgctgtcccccgccactggcttcgaagcccaggcttccgcacttctggagaagaccgacattattgcgtctacgccgcacgccctcgtcgatctggtgaacacattcagccccgaggagaatcaggaggcagctggtcaaagtgttatcagtttgatgcagactcaacttcaaggggaggccaaccggggctgggagcttaagtgcctccctcgtccttggaacgatgtccctgacgccgagacggatgagcccaagtctttcgagtcggtgaccaaggttcctttccccacgatcaccgtgcctaatcctgtaccgaacggcgcgcgtcctctcttcccagaggtctacctttcggtgtatgccaaccaagaagtagacaccgtccctgcgatcacagacatctcctcttcgcttattcgggatgcactggtagacaccattaacctccttgacttcaaccgcgttgctacggccaagttcctgatcgatatcgactgctattttgcctctaccacattcgtgaagcgcgccacgcctttcgaccgaatgcgcgagctcatcggagaggtgcagccgtggaagcccgaggatgtggcagtggacgcagtcttctcgcagctattccaattgccagcgtcggaacacaaactggtctactatcactctgttctcaccgagtgctgcaagatcgcccctgcagcaattgcgccgagtttgggtcgtgcaatccgattcttgtataacagcctggaaacaatggatttggagcttagcaaccgtttcctggactggtttgcgcaccacttgagcaactttgggtttacatggaaatggagcgagtggtaagtcgacaatgtcagcttctacacggtgtaatcggtcattaacaatttcacagggccgacgatcttgatctgccctccattgatccaagaatggcgttcatccatggtgctttggacaaggaaattcggttgagcttcgctcagcgcattaagggaactcttcctgatccctaccccaagttgatcacagcaggcaaagagaaggataccccggaattcaaatattcctccgaaagtaaatttaattcgtggcccaaatggcagagaatgtggctaacctgaacttccagtggcaccatattccaaagaaggacaagaactcatgcagcttattcggaagaaggctagcgacgaagaaatccagcccgtcatcaccgccattgaagaccaggccaaaagccagggcgttgacgaccccaagatcccctcgacagatgcattcgtaacatcactctgcttcgtcgggtcgaaatcgctctctcacgttttgtcatgcatcgaacggagcaaagaccgtcttctggccatcggcacggaatcgccacacgcccgctgccaaataatcacctccgtcatggagtactgggtcgatcagcctggtattgctatcaacatcatcgacaagctgcttaactacaccatcctcagcccgctctccgtcctcgaatgggctctctccgagtctgtcgcggcaggaaccatcctcgcaaagccccacatcttcgagatgatctccgccaccgtaggcaaggtcactaaccgcatgcgccagatcgtcgccgcccgcgtccagcccggcctctacgagccccagcttagcgtcatcgacgagaccctcgcgagcgagcgcacagacatgcaagccctcttcaagtacatcgaggactctatcgtctccatcgccgcgggaagcaacgatgagctgatggagcgcggtgatggcagcggcactctccccgaggacgccatcatccgccaatggggtcgtcgctggctccgcgtgttccggagaaaagctgccgtcgaggaatccttcatctctgatgccctggctaacgccactcccctcggcacccaggccccgcctgtttctgtgcgggagggtgctgcggatggagatttggatattgccgatgccgatgcgcaatagagctgtcacaaatatggatgccatctcgatgaggtattagcttatgcatgctgcgttctcgcatttgatctctttgagctttttcattaaatgacttatgtcccggagagcctttttctgcctttttctccattgctcctctgtattgtacactccaactccgggtctttgaatggctgacagaaatatgaaaatctctctccgattattccaaattaacctttctcgattcttctcgagacacaacgaatatgcgggttgccgacctacaccactgaagttgtacaaaactagaaaaaaaaaaagaaacaccccaagaccatgttgattcaaccgtacaaccctaacgcggggatatcccaaattcaaaatacatatgaaagtcttcgtaaatcgtgtacatcttgataaacccaaaggaaaataatgagaaaaagagtgaaatccaactaggacttggatccagaagacaatgagatagaacaataacaaaaagggaattaattgtggaagccacatggaaaccagtaagaaataagaacagggatatcagaaaggggtcatcagtagataaatacaaagcaatataaaagaagaatgaaaagaaatgtccgaaaccaaacccaatcaatgcccatgaccatggctatgaccatgaacatgaacatgaggcttgcgctcaatataataggaatccccatcatcgccatcactgctagaagtattataaacggagaagccatcctcaaagctcccacggcgcatctgcatctgcaactgcatcttcgaaacgccctcctcagacccaacagactgtattcggtccatgaggactcgatccacgggggcacatctactctttgggtcagaccgtctcgtcattgagattcgccggtccttgccacggcccttgatgcccttgttgctgtttttgtatagcccggcgaaatatatccagagatcgcgatctgccgcattcatgttcatcggtccattctcggccatttgtgagaaccggatcgttagattgtggagtgttgctgcgtggaatttgttttggtgtgactgttttgggataaggggttagttagcatgggttggcttaaacggtggtgttgtatggaagtattgatggagggttatcataaggaggacaaaaacttaccttgaggttgcctaactgggtgaactgcttgccacattcatctaaacggcagtcaaaccgtttagattgatcatgggtgagcctgtgagcgcggaggttgcctcgctgagcgaatggcttgtggcagatgtcacattgaaagggtttttcgccggtgtgtcgccgctgatgggtctaggttttagcacacatgtcagtgtctgcctcgtgcatcgcaatcgcctggcgcggcagctggtgatgtgcttaccttgaggttgccttgctgcgagaagcgctgcccgcatgagggttccttgcatatctgccccattcaaactggttagttgctgtcttaaaacatttgattcaatttggatagacatatgacaagtgtactcacaaatggcttgtcacccgtgtgtgccctgatatggatttctaggtgtgttttctgcgcgaagcttttaccacagcctgggagggtgcagttgtacttgcgcttcctccgcgatggctgagtttcattggcagggtaccgcggtggcgttggcgaggcagtcgggtaggatccggcataagtctgtggtgccgggggtgccggatgctggagtggtggcagcgattgctggatcagtaatgaagcatgcttggcctgaattgccttcatcaggacatccacgttggttgagaaggcgagatcagtggtggtttgcttcgtctcgttttttgccccgactggtgaactgtggcttccagtcgagatatgcacccgtggagcatggtcgggagtagacttgattgtatggctgatggcgttcttcgccggacgaatctctggaagagactgcaacggttgtgctgttgtgcgcagtggttgcggctgtaacgggtgctgactatggacaaagtattgctgatagggattcgagtgtgcatgtgtgtgacccacagagtgaccgaagctgtaaggcaagctacttgaggtctggtaatgcagcgagtatgatgctgtttgatgcgaatagaagggaaagttatggctcagggtcgagtctatcgagcgtctgtgtgcaaacgcactcacggcatggccagggaagtcgtaagagacgggctctgaggtctccatcttgatgactgtttgaggtcttcctctcgggatctttcagaaaggtaaggataccttctccctccggatctccaacgagataccaatgtatctcaatgtatacctgtcctcgggatgtgctggggagtttttttttttctgaatagtctttgactatgctctgagacccaatccccggtgatatttgggttctggctggcaacgagttctcagaaagaagcaaggatggggaaaatagacaaaccggccggccaaagcgcaatccgttagatctggatgtatatatgtgagataaagaggagaggaaatagcaaatatatgcaggtcattcatgaaaagcgagaaatataatgattgacaactagtgatgatcttccgcatcgaccgtggcgcctcccgatctagatatacctgcaatggcgggggcgacagggggaggggaggcagnnnnnnnnnnnnnnnnnnnnnnnnnnnnnnnnnnnnnnnnnnnnnnnnnnnnnnnnnnnnnnnnnnnnnnnnnnnnnnnnnnnnnnnnnnnnnnnnnnnnnnnnnnnnnnnnnnnnnnnnnnnnnnnnnnnnnnnnnnnnnnnnnnnnnnnnnnnnnnnnnnnnnnnnnnnnnnnnnnnnnnnnnnnnnnnnnnnnnnnnnnnnnnnnnnnnnnnnnnnnnnnnnnnnnnnnnnnnnnnnnnnnnnnnnnnnnnnnnnnnnnnnnnnnnnnnnnnnnnnnnnnnnnnnnnnnnnnnnnnnnnnnnnnnnnnnnnnnnnnnnnnnnnnnnnnnnnnnnnnnnnnnnnnnnnnnnnnnnnnnnnnnnnnnnnnnnnnnnnnnnnnnnnnnnnnnnnnnnnnnncccccggtatagaaatcgccgggaaggggggggggggagggggggaggggagtcagccggtgaaatagttgaaaagccccatttcgcctgtatgacgtttggtaattcgatttataaaaattgggaaaaaagggggggggaagaagggcagttcaaggccagagatacatgcaactgtgtatagtgtgtctgattcgacgatctccgtgggccggggatcctgggcgattgaggcgacctgactccaccggaaaataatagaaaaagaaaaaaagaattccaatcaaagggacgaactggggttcctggggtttcgtggagctttgggagccctagagagccctggccctgaggccctgaagcactggaggtgcattgcatggtctatgaagatgcattttggacgcatcgattcctgtaccacaaggaatagtaatttctcattagtcgtaatgtattttgatacatttggtgtgaaatgtgtgtcagtcacacgaatatactcgcagccgcgactggcgacgaaagccttcagctcgttcccctatacttcttccatacttccttctctggatacttctgtaactgatattgttgaagagactgacatctgtcagactcataatctcagaaaaagaaaacacgcaaactcatcgtgctgtgcatctcccctcgaggagacgggccgggcctttcaatgaattcgcaagtggaccgtgatcgacctgcagtcgacatgtagattattcagtcgatctcggagtcagcaatcgctcaatggctagctaggccgtaattacgagtactaggatgcgccatcccgatagtcgccaatagcgtccgatctcagcccatcgaatatcctagttagccgcccaaggctttggaaaattcaggctgatctgaatctcctgaagagccaatcaaattgacctctcccatctagtgagatctgtctctgtctctcttttgagccaagtgggagtcgattgtggcccttaataggaggaatcaatcagcacgggctttggattggtgtcgatatatttcccctccccccttaaactgcgaatggcttggctcatgggccatgtcgatcatagctactcgtggtcttagctccatactgggaacgatccgagaaatgacagccatgaccatctgacacgagtaaccctgcacgtcctgcatcgagatgaggtatcgggacttgtcaagaatggttcctgcagggatgcgactagtcctcacgaactacttcctgaatgggcgaaggctagactatgcatacgcattaagcctagctcggtgctttgacgagatttggatcagcatgtctccgtagggggtgtaggggatttgaggtgtttattaccgagcttttgacaaaatattattcggagtattccgtattccgtattccaagtctttcggagtacaaaatgtcggaggctctgtggtgattcagacggacagggatgtagttgggatgagattcagctttccagaatgtccgtgtgaccactgccctttacatctacaacatacatgacaataaaccaggtgtaaagaatggcgattttgaaattgaaaaagggaattcacgtatacactaaagcgcacaaagtgtataaagtaaagaatagaaacaaaattctgcataaataaagcccaccaaagcaaaaacatcatattgcgcccaaaggatcaaccctttcatcgtccagtatacgccgagtatctagaaaacaagtcagcttacgatcctgaaacacactcgggacaactcacctccagattcgtgcacgcatgtctccactgccggtcgcgaacaggttgccagtaggactgggtgcaaccgagatgactattcggagttaaagagtcagagatgataatgcaagctaggattgtatgaaactcaccagagttcttgtggccttgaagcatcatttgggcatttccagtcactgggtcccagaactgaacaccacggtccttggaaccactcatcacccaagcaccgtcgggtgtcaggcacacactgagaacaaagtcctatattgtagtcaaaaggttagcttctgcctatctcgctcaagtaatctcagatctaaccttgtggccctcgaatgtacgaatacacttgccgcccttgacggcactgtgagggtgcatgccccggggaacggtaagctcccagagcttgatagtcttgtccagactgccactgacaaggtcacggccattgggtgcaaacgcgaccgagtaaacactgtccttgtggccatctgggctctctaggcgttctaccaggtatccagttgtagtgtcccaaacgcgcacgctcttgtccaacgagcccgcggctacgtaacggccatccggagacatggccacagtagtgacaccatcctcaatgctaagggtgtagacaagcttgccgtcgagaatatcccaaaggcgcacggtcttatctccactgccagaggcgatgaatcgaccgttgccagcaaagtccaaagagtagatgtcctgctcgtgtccactgaagatatgtttgatggtgcgctggttgatatcccaaacctagagccaatcgcattcagtcagtaatcttcctacatagctggttccatataatctcaagacttacccgaatctgcttatcttcagcaccagtcgcaagatatttgccatccggactgaagcaaacgctgcgaatgtataagtcgccgtccttgtcgacgttttcatcctgcaaggtggccacattttgaccggtggtcacgtcgaagatttgagccgagcggttacagcctgtagccaagtatttgccgtcacggctaaagcgcacacagcaaacgacgctgtcgtggttcaagtgatgtaccagttccacatcgagaacacgctggacctcggggttgaacacggcataccaatcagaaccctcacgcttctgcgacggaggcaaatcatcggggttccagtttgccagcatatttcctggacgttcggctgtgcggccgagaggggggttcggaggagtcgggcgagggatctgaggggaagcacgaggatccgggtaggcgatgtgcgtttgctggggggtaccggggcctgggggaacgcgaccacggcccttaccagggcctggggatgcagtaggaggtggaggcggcccatagcctaggagatgaacaatccaacaggtcagcaaactgggcgacaactttcataaacacaacgacataccgttcacagcagcgccagccggatatcctccaaaggagctctgctggggttgcggcgcgccaggctgagcgaccgaagcaggctgttgaaggggatgctggggaggctgctgatcctggggaagggaaggtgcaagaccggggccactacctggtgggttggtcatgataccgccaaacagattgctggggccgtggcccaaggcaggtgggggagcctgggaaggagctgtatgagccgccgcgggtccgccgatgtgggaagggatagattgcacgccacgggactcaagttcgtgtcgcagcattcggatctcagcttcatagctaaaaaggaaaaatgtaatgtcagaaagggttattcaagctttcaagaaggtaggagggacgaactcttgcttgatcttgatctgcgcctgttccagttgatagaccttctgacggatcatctccatctcctggagctgtccggtcactgcatgatctgtcagttagataacacttcagcgaatgtcggaaaccatggagctgcagtcattgggggaaatgagctgcagctgcttgtatgggggggggggggggggggggggggggggggggtgggggggggggggggggggggggggggggggggtgggggggggggggggggggggggggggggggggtgggggggggggggggggggggggggggggggggtgggggggggggggggggggggggggggggggggtgggggggggggggggggggggggggggggggggtgggggggggggggggggggggggggggggggggtgggggggggggggggggggggggggggggggggtgggggggggggggggggggggggggggggggggggggggggggggggggggagggggggggggggggggggggggggggggggggggggggggggagctcaaggcgcgaatagcccgagcataggggaggggaaacaatatgtcggaaaggagaagataacatacactgatgctcgaattcaccggtgtttcgcgactggctctcaaactcctggcgcagttgatccaacaactccgtcagacgggagttgggagcgggtaccatcccgcgatgagcgttgtacatggtggaggataatttttttcttcctgtctttcacaagtcggagagggacgaaagcgacgttcggacggcaggtctaggtcagcgaataggatcgcaaccaagttttcgacctggactcaatgatcttgatcaccgaggcttcaatgcttggtggatagcaccacgcagctagccacagcgatagtgggcgatacggtataagctggaagatgagaatgggggtgtagcggtaagaggggtggaagaggctggcagctgacactttaaagcgggaaggtttgagtttggggggaaaggcggcaatggttgacgcgtgaagcgaggccatagccgagaagcgcagcgggtcttaccgtaggctactttttaaccttgtatataatactactcctataacaagaaagaaaatgctcaagcaaataacaattagatgagtacttttatacgatacagagatgaaccaaaagatctagttttagttttggatctaaagtacttttgtatagggctaaatacgttcatttatccatatctatgaggtccagatcgtgaggttcgcatgaaactggtattattccaaagatacctggaataccagggaatacttggatctacacccgccggtgcgggcagtggaggtacctctgagtacgggaagccgaagtggaactggtccatgcagtaccaatttagtactgcagctactgtatgtattgtaattttgacttatcatgtgttgattgcctgataagccacaaagtgtattcaggcatcaaggcatcaactgtggcaaaccaggggttcttttaaagtttcctctctttttcttagtacaacgcaggccatgaaggtatagttatgaagtgataggagtgaatttagaggattcgtatagaaactaatataaaataaactactatatactataactccatccactcataagataaccatatcattaacccgcatcagaccatcccccctggatcaattggcttattaagaaaaggtggcatcgcaacggctgtggcggttccgcgctggtatgactactttgttattcgctgcaaatctcctttttcttgttccttcaagtactcctcattcttccctgtctccctccccctcccctcaaccctatctgtgccctcaatcatggatatcattctcgaattatgggacacctttattggtgatcgcctctattcgacacttctccccgcctcgttatcttcgtccgtctcgttgccggcattcgtcaatgcggccgccaacacttcaatggccctttttggtccagaaccttttgtctatgaacaggctacacagatgatttacctggaaccttcgaaatatgcatacctgagtgcttggcccaggaacaacatttaccgtcaatttacaagcttttttctgatcacttggtaatgcgccaattctttcaaatcgctgctttttccgtgtcggtacaatgtactaacatccaattaggctgtttggactgcttgtctacttcttggttgcaacactttcattcatctttatctgggacaagacaacctacaaccaccccaaattcctcaagaaccagattggtctggaaatcagacaggccatggccgcaatgcccccaatgtccctgttgacagctcctttcttcgttcttgaggttcgcggatacgccaaactctacgacactaccgccgacgaacccttcccgtactacagtctcatccaaatcccattcttcatctgctttaccgatttcttcatctactggattcaccgcggcttgcaccacccccgtgtctacaaaaccctgcacaagcctcaccacaaatggatcatgccaagcccttatgcttcacacgccttccacccgctcgatggttggtcccaaagtgttccgtaccacgtcttccccttcatattccccctgcagaagatcgcctacgtcttcctgttcggcttcatcaatctctggaccgtcttcattcatgacggcgagtacgtcgccaacagccccatcgtgaacggtgctgcctgccacaccatgcaccacttgtacttcaactacaactacggacagtttaccaccctatgggaccgcctaggtggcagctaccgcaagcccaacgaggagcttttccgcagagagacaaagatgggcgataaggagtggaagcgccaagccaaggagatggagtcgatcctcaaggatgtcgagggcgaagacgatcgcagctactcctccgaaaaaaagaagaatctttaaaacgacggcgctaaatcacattctttacgacttcacaatgcttacttggttctagactacagggatcaatcgagggccactacagacttttcggtagacgagctgtattcttcacctgtgttttgggttgggaattttggatctccccgttggttttcgtgccatttttacgctaattcaagtacattaattcgccttttgcatctcttatgtgttttaatactcccaaaactgaccagcactcttggcttgctggtccacgggtagtctaccctattctgtatataatgttcctttttcttcttttcttctttcttttttccatgggtgatacaaatgcacttgtttagttctctctgtgcatccttctacgtgttcgcaaatttatgtgatattattaagaccgaaacagattcgtatgtatgatacttttataaacaagaaataccagaccagttcaaagttacataattggaattaatattgggaatcataatatacaacttccgtctccatcaagtactccagaccctggtcttcccgagacaaacagtatgattgctgccacctgcgcaggccttttgatgatggtctgacataggggaaaaggctcctctcctctgatggatcgagaatgatgggcacgtgcgctaccggagagttcgtatgatgacacctcgtgatccgtcagtctcatgaaacccattatcagccagatcctgctctcggctcggccagacctccgccctggactgcccagattcagccgaagcaagtcgcttgtgaagagcaaccactcgattagcctggtgagaatccccacactccagcaccgtgagcttggccttcaacttcaatgccagggtaagaatgcggtggtagaagatatcctcgggcatgcagtcttccatcccggagcccaagtatggaggcacaagtgccagcttgggctcaaagcgccgtacactgcgtgcagtggtaccgttgcggaagtccgtttgggatatgtagggcgggttggagatcaatagatcacattcactttcttggtcgggtgatgagatgtccaatgctccgagattggggtgttgtgtttggagcattgactcgatggacgggactgaattgtcactgttatgtccgaggacatcggcgcgatagaagtgtatgtctgtccctgcacggggtgccaactggcctagttgcaggttatgctcgagattctctcgggctaggtctaaggccgtaggactgatatccactcctgttatctctagctcctggaaatgaggacaaagtaaggcgtgcaagagaagtggtatgcaacctgttccagtgcaaaggtcaatgacacgcaagggtctcgcctgattaggagacttggacttgtcattatggcccagggccatttgacggaccaagttggctgcttggtacgtatacgattcagtttctggcctatgaatgcttgtcagtaagagtatcgatttttaaagaatctgataggcagaccttgggatcaaaacacctcttcggcaaagaatctccaagtcgccgaatggttgatctccaagaatatattggagaggatatcctctagatcgcatgcgacacatagatctcaatcggcttctccatcctgcctttgatggaagagactggctatcgcgaactgcccgctcgcgtagccaacgaagctcattgcgagccgaatcgattgtgcgacattctttaaggagtataggcagaagattattttcccgttgggcttttataatgacagaaaaggggattcggggcattctgggaattcgaggaggtggtcagtcggggaacgttggtgccaagggatgcctatgccaagatatttacaaatttatatacaaattcatagagatctatgagatttaagactaaggattgtaaatatacgtcagttaaccataccagttttggtcatttacattagagaaggactcagttgcttttgctttgatggcttcttcatccctagggatgtggtccttaggatggcgttaggctattgttgatctgcgtggtcgaagggtgtcattgtgaatgtgcagagaattcactttctatatattgatagatatgtaaacaagtgagtaaatgatgaagaagatatctcacacatctagaaggccttcatgtccatacgcgtcaggactcagcagcccctaggctagtctgaagagagctgggagaagtgaatatagctgtaaggatatgtatacagacagttttccacatgcacatagctatattagatcaaaaataggtgctttctatttcataacacgtaagaactcgataattgagagtacggacaataattttaggtatagcctttccaaaccccaaatacaccatattatgcgagacatctacataagaagaaaattaactgatcagccaaatgaaccctagcggttttagaaagccagaagagctcccacgccgacaaggccgacagccatgtgtttcggcatagcggtcgccataggaatggccatattcccagtgacagaggaggtgccggaaagtccggtctctccctgcggtgctccgattcgagcagcggtgccaccaaccgacgcggtagtcactgggttcgatactgcagttgcaccagggacggaatcagtgccagtcccgatttccaaaacatcattctcggtggtgttgaagttggtgttggcgagggagatctcattattggcgagatcgtataccacatatgcgctgcgaaggaaggtatctcccaggactgccgtgctggtccccgcaggaacaataccgaaaacgcaggcccgtttgccgttccggaaatagagatcgccaacatcgatgatcatctctttgatttccacactgatcgtcggggatgagaatgtgtaaccgagggtgatgttcttatctgccatgctgcattcaacatagccaatgccactgtccgactcgtaggagacactgagatcattgtagatatcctgaaccagggcgtccggaaggtatgtaagagagcttcccgaatccagcaacacgcccgcaggaagggcactggaagaataggtatttttgccggatgaattggtgagggaaagtccagtgagcgcaatgatgaactccgaatactgtccgttgaccttctggacgggaactgtttgcagggtgccgtggtatttcttagtgttgactccaccaaacaaaatcgagcctgtactcgcatccagatcgttcagccagagactgtaggcatttgattggattactcctttgctgaccattgccttgggcaggttggcataagccgagtctccatttctgccaacctgaacttcattcgtagtatatcctatacccagcacaccctctgtatacagacatccatgttagctctgtggtaatcagcgttatatccgacagaaatcactcacccgaagagccagaggtaaacccaaggccaaactggaagtctttaatagttgtgcctccaatggtaagggtgtcggtgacatagtctccggcggcgccggatccatcggcataggtgatattgaagtccgagttcacgaatgaatatgaagaggaagagctcgagttgtaagtaccagattcagcgcaggcgtctttgctggctgcacagagagtcgaattcggcgtattgcaccacaaatcactacttccagtgtcgagaaccaggcgtacactctgctccggggtacccagggtaatattacagaagtataaagtttcctaggcagacacattagcagctgcgtaagaattatatataccaataaatagatatataaatagatatcatgtgtacctcattgtccaatgcctgactgacggtcgaacgtttcctccttgcttgatctctagcgacggggtcgagaatatcctttcgttgaatatccatttgcaccacggcggggttatctcttcgatggagggttaaaccccagactggcagcgccaggccggtgaccaataagacccaagcatttttcatgatagcgtcgatcgtcctccccgtattccgcaagtaagggatgagctattcgattttttgaacttcagagatgacgtcctaggtgggggtggttttgaatagagtagcaagtcaagaggaaagttgaagcaaaagagaggtaaagagggaaaaaaagaagaaacgggggggaagttgatatctttccacaaatgactatggagctacctagtcggctccagccggattctcaggtggatcatacgtacaatagatgtattttatatatttatatctttcctgttcttctcgaagatgaacgggtcaggcgggaactctatagtgctgtcgtcaccaagcataagtacaacgtaagtgtaaacgactttgtatacatatatatgtagttgatctaacatctaacataaaccaagtctttaacctttgattcctaaattcaacaaatcatgactttgtacttttcagcgtacgtacgcgatatacgtggtggaggcgatgacgcggtggactccactttcagccccctttgggctctaacggacatgactctaatacttacatattgtacatctcactaccttcattatatattgtaaagtcgaaaccgcctactcgccacttacagacccatcgcatcccggatttgctgcatggtcatccgactattggcccgcgctgcttcggcgccctcctcagccaccgactccaagtaccctgtctgatcatccatgatcgtaatataccgatctcggatttcttgcagatgatggatgattcgatctgcaacgtgttccttgaatgatcgaagacttgcgttgtggaactcagccgcaatatcctcgcaagatacaccctccaggtggcttaggatttcgatgagattagacaccccaggccgacagatcgggtcgtaggtgatgcttgcctccgagtccgtcagggctaccttgactttcttgcggatctcggccggtgagtcggtaagaatgatccgggatttcccatcggcgtgcgatttggacatctttgacgtgggttccttaagggacatcactcgctttgcgggggctggtcaagttaatgtttcgttctgttcgttctgttcattcttccttcgggtaactgttatcttacatatcaatgcctctggtatagggaagatgggcccatagaggtggttgaagctattcgcagtgtatctggaaaactccaggtgctgtctttggtcttctccaaccggaacatgagtcgctcttaatgatcattagcaaagaacggccaatgtagacgagaaacatacttgtgcaaaagaatatcggctgcttgtagtactggataggagaaaagaccaagtcgaagctgtgcccgtgccgttgaatcatcaagggtggcgtcgtctggcagctgtagcttactctggagagtgtcaataagatgctctttctgtataaattacagggccgctcaccttccactgtgtcatacgcgacagataccccatggaagccaccgtgctgagaatccacatcaactcggtatgtgctggcacctgatgaatgtcaatatgaaatcccgattgtccctagcagccgacagctataagacgagaacctaccccggactggtagaatattgtagagcgcttaggatcaaggcccacagcaagcaatgttgcaaaggcctccttcctccatttcttcaattgggctgggtcttgtggtaccgtcaatgcatgcaaatcaacaatagagaaaaacagcttggttccttcggttgcatcttgttggagcttcacccattgatgcaaagctcctagataattgcccaaatgaggcacaccagttggttggatcccagaaaatataacgggctcttgtgctggcggcgtaatgcttgagctgttccatcgatggcatctccttggaagaagagagagcccgcttggacggatatagagatgttttgcacgcaatggcctcggcgaggcaaattcatgacgcatcgcgttagcagacatctccaacaaacgctaaatcggtgcgagaatggaaagttttaggtgcaattgcttcggactgccgtagtccccaataaccaccgaaaaacgcgaaacgcgagatttatcacgtgatcaacatcgtacaatgactcgtaatattcaaatttcgcacatttgcagaatatgcgagcagtaacacgtctattggggatcagttgtggcgagtaacattcagtatatagaaactttctttcatctgggcttaaatgagaatagtaaaacagtaaaatacatatggcctagatcaagaaggcttttgaatataatggaaacagcgcctgcagcaaagacagcaagtccggatgttcacgggtatacaagttcaacagtagatcgccattccatctatagacgcttgcgctcggcgaatcgctcattgttcaaagtatcgaatatcgtgcccgggcccgagttgtccttccgctgaccgaattgcgcgagctcgggacgaagagcttcttccacctcggcaacagaagcgtccatggccttaccagcatctagtatagagtattagtactctgctcatagaagacaccagccaggcgaaaaaggaaagaaaaaaagtgtaacccataccgagactgtcatgttcccagacgtttgccttcatacccactccataaaacgcatgcttccggaggaatgcaagccatgcctgcaccgcttgtgggtttccatccttgatctgaaccagtcgacggagggtgattcgttcaaagttctcctggctctttttgtgcacgaagttacttcggggtacggtccagcgttcgacgatgcgagggagaggcacaggcccggacacaggaagattgaggtagtacgcggcacggatggcaaaatccgtgaagaactccacgttacggacgctgtatgatcgcaattgaaggtcgcagactgggaggccgtactccaccttcctccgcaaaggccttaggtatatggcttgcacgctgcgtggaagtcggttctcctcaccgaatgctcctaaccgttcagacctaaccgaactgtgagcagtgatctttgatctatttcgactctgagccaattgccttggatactgaccattctttcaccttaggctcggtaatttgctcggcttccatcggtctgcaatgtctcaattagcaacaaagccgaatcatcctagatttgaagggtatcttacgctactggagcaatcgatgcaggggcggtagcggcgggggtagcggcgggagtcgcgacgggcgtagcgtcaggtgtagcggcaggtgttggggtcacaggggcagcttctgcaggagcagctgcggcaggtgtcgatgttgggtcttgaacgggtgtcttctcttgctccggcggagttggttgggttggggatgatagagagcggaatggcacaggcaccttccaaggagctgttagcgtcgaaattgtgagttaaacaaaatgagaacataccctgaggcgcgtgctcactccaattaaggagcgcgatgtgtatgagaacattgttaatcgtgattttgaggaagatccgttgttgttagcggatgggttttttcggcgagcgagtccagggcggtgagtggggaacttggggatatagagaagggaccgagacgactgtctccaacggacggtgataactatatctcctcagtttaaatataattaggtcaatgataatccatacgaactagtgtatcatcttttgccgttattatataaatacgtcaattgtataatagtataactgaggttgtgcaaccaattccccatgttaccgtatatagttatagatgtgttctcttgtaggtgatcatctctcttctgacttttagataggatgttccattcaatgggctcaatattagtacatttgacatggctaatgtagtaagtatcccccgaggctgcttatctcgaatcctctccagtatgaatccgatcattggcacccccgccaaactagcgacctgggcaatggaaccatgtgactccgcacttggaaacatcgctttctttcgctcatccgatttctcactttgtatatattctacttctttggcggtttacgacactgaattctgcaaaaatgacaaagatagacctatcctcgttccagcgggcaaacgaagcggttttttatctcagagccaagttgccagagaccttgcaaaggcctcaggtcgcaattgtatgtggctcaggactaggagggcttgcagataccattcaacccgagtcacggattgaattcgactatgcatccatccctcatttccctcgctcaacaggtcggtcacgttcttcgtccttagggaagagtttctaacattccgcagtcgttggtcacgctggaaagctggttttcggtcttctcggccaaaaaatccctgcggtgttgatggttggccgtgcccagtcagcttaagccctcattctgcttgtaatatcacaactgaccttggaatagttactacgaggggcactcgattgatcaggtggcattcccaattcgagtgttcaagcggttgcaagtggatacggttgtctgtatgttctacattacccttaataatatgaagattgatgttacagaaaaacgagaattaatgttgtttggtagtgaccaatgcggccggaggtttgaactctgagtatgctgtgggggatattgttctattgaatgatgtaagagaaaccgtcaaatcctttgagcggagttattctaacactgggttacagcatatattcctcgcaggtttggcaggaactcatccattgagaggacccaatgaagaagaatttggagtgcggttcccacccctgtctgacgcctatgaccttgatctccgtcgccatgtgcatcagtcatggaagaaagtcatatcaccggaaagcaagagaaagttgcacgagggtgtatatgcattttgcggaggtcccacgtaagtcgacacaacacaatttcttttgaatcttattctgatagcacccaagttacgagacaagagccgagagccgcatgcttcgaatgcttggtgccgacgtggttggaatgtccacagtaccagagattgtcactgccagacattgtggtctacgagtgcttgcattcagtttagtcactaacaaggccgtcttatctcctgtgcctcggggagatgataatttgcttcagaataaagcagcaggagaactgagcgctcttctggaagagggcatggcaggacacgaagaggttcttgaagctggccgcgcggcagccattgacatgcaggtaagatcgttgcatcaatccttggaagacgatgaaattgacatcgatccagaaactggttgtcgaaacccttgtagatgtctttgatcaagtgtaagactgggcttgacacggatgaatgcatatgatgatctcagaccgtgacgacctgggtccaacttattaggactctagcagagacaatttcgtcgtgtccgccacggccaacatggtgttgttgttgttgttgccattcaaggcataattgacaaaagtagataccgaaatctcacttgtttttccgggttctctttgccttcaggtccttgtagaaggacttctttccacttgatttgctggcttgaatgtccctatatttagattcaaagcgcttggtgccacgctcgagtgccaatgtttcatcaacgaaattcttcttgcggtccttcttggtgatacggttgctgaagaactctgtagggccctcgatgatggttccgacctgggaatattctggtggtttggccttgccattttccttcttgtagtgacgcttgggatcaagcacagaacgcatccgaatgagctgtagatctctcttaagctctggggtcatttctgtctttgggaggttgaaccactcaggtccagcagtaggcttgtcctatcaaggtgagggttgttagcaaatagctacaaatgtcgcacaccgagaaaatatagtaattgtgatgaatgctcagagtaactatgaataaaaggctctcattggtgcagcacagcccaagacggactggttacgctgcatcaagcgcttcgcgttgggaatattttcctcatagcaaaaaaaaaaaaggaaaggagagtaagcaaggacgagattgactcacggtgttcgctttcttgatctcaacagtgcgaagagaattagccaactccttctgcttttggtcggtgatctttgcagcatcgacagtagcaacatcatctccctggacaatatatgattccagcgaggacccaggtgacaatttcgggatcctaggaggaggtaagcctagatcctagcacattgatcttcaacatgtttccatacctaagagatgccagatcatcaatctgggtgcttggcgcattgaggccctttagtcgagtctctgcctctagaagcaactgctgaatctgatcatcggtcaggtcttcctgaacatccgacacaaatgttgagtcagccatccctggtgaatagggaggacaaaggctcaagaggtttaaggtgagtggagagaatttatatttttttcttaggtttgcttgctgcttcccggggccggacaaacgtttatgagaaatttctgcttagtgcgaaagtggagttggtatcatgtgacagaactacttctttccaaggtacagttacaagtacataagccgtttccgagcgaagggtcaagtactgttacttatgcgcgttgtactccccgaatagtacagctcatgtattgaaacgttcacctatcagagctatttgtctaaatattcttcccagctctggagattatatacattgcaataaagtaaaacaatgctttacaacaattgaactattttaaattagacctgattagatgcaataagaaacccatattactatcttggatataaaccccccatatcacatccatacattgtataggtattatacaacatcgagctcggaggggtggccccgaggaacgtcagacagctgaacacctctagcttagcacccaacgcgccttgacctggaacacaacaagcttcatatagtctgtgactgtaacactcatccgattatcgattttatatcgcgttcattcgttctttgttcttagatcctccaccccgcctcgccgtatctcacacctggtcgcgtcgcatcctctcggtaccgcccgatacaccccagagtcccatatagctcaaccccaaagcaagcatggagcaatctcctcaaggctctgcgcagcagggcagacaacagccgcagccgatttatgatgttagaaatgggggtcattatggtaagttccaagtttgtcaatgcgctaaagctacgcgccaaaacctggtttagtcgctacctctcggctacacaatcgattcaaatggaagctgacaacatccatcatttataggtgctagcgcagcggtatgtccatcgcggtgagccacgcgggtcttaccaccttcactctacgatgatcatgcggaatgtcttgagtagcaactaatcaagttgggtaaaaatagctctcagcgcaaggttatgcgccagtcgccgagttgtacactggtacctgggccaacgtaagctcctgagatgaccagacaaatatcgagctctgatactcacctgaactaggtaaaccaaggccttcaaggaactgcacgtgatatcttgacgacctactggcaacatgtcatcaaccatctggagtcagacaaccatgactacaaaatccaccagttgccattggcccgtatcaagaaggtgatgaaggcggacccggaggtcaagatgatctctgcagaggcgcccatcttatttgctaagggttgtgatatttttatcaccgagctgactatgcgtgcctggattcacgccgaggacaataagcgtcgtaccctccagcgatccgatattgctgccgctctgtccaaatccgacatgtttgacttcctgattgatatagttccccgcgaagaggcgacctctcatgccaagcggtcgagccaggctgccggtaccgccccaggaccttctgctgcccccggtcagcttccccctgccccgcatggggttcaacagcaccaacatatgggccctgccgactatgcccttggccagcacggtttgcctcaggaacaggagtaccgcccgcaacctggcatgtatcccggagctgttcaagacccaggtgcggcatatggtcagcctcaatcccaaatgttcgaggggatgtacgcctacccgcatctccctccccagcaggtacgtagttgtatatctcatcttcagcagacaaaactaattatgattgtcaagtgaacctgatatcagccaatggtctagtccgtcatttcaatttagttcatacgcgtttcaaggcgagttttggtctattttctttttttattgttcttatttgattcttctattgttatattttcccacgcacggcaatgacaacgctgtagagtggtgattgagcgaccctgatatttctgatatttctgatgtctcgggattattttatatgcggagttttgatcctggccagaaaagaagaaaccacatgtgacattctgactgttgtgtgtgacttactttgttgattgttagcagtatcatgtatattcctacatcttgtgcaataaatcaaatctacctctcttgcaggttttggagtaagccgaggttacaatctgagagacaagagacatcctcagtatatggtaggtatgcttctagctgtatttctggattcccaagaggtacttcatggttgtagtgaaacattgcattacccacaacacaccatggattcatccagtcttcttgaagcgggatgaaagagtcgcaaacttatctaccttagtaggggcttgaacactccgtgtaagcctattcacaaacagttagtaggtagttcatagcaatgagatatactttcgaatcgtacttttcaagcaaaatgggcccttgcatggcatcaacgcgtccatatttcttgttcctcgtggaaatgtcataaaactcatctgcgctgtccgcttgcatcaactgtacggtttgctgtaactcgtcgaggttctcgcgaagaattgggacatttaagctatccacaaattcggcaagatattcaacatcttttgccaatgctgcaactccgttggggttgatttttttcacatctggggacagtggttgcgcctgtatgatctgtcagtaagtccctttttcaattcattggggttcatagaaaacccaccaaaatcatgttagcagcatggctaagggcatcaaagtagatgagctctttgatttccgtcggcaaacccaacaatgtggagttcatgatgttggacaaaaatcgagtcaaggtttgcatgtaattgctcggctctgtgggaggtgtagaagacatccactcatactctgctgtctcgataaggtcatcgattttggaattgactacctcgaagatacgcttctcagctgccttcttgttgcttttaaacttttcagtagccctcaacgcgattgaggtgccggtggaattctgtgatcgggctgctgccaataagagttccagctcgcggcaagctagctcgaagtgttccagattaataagaatctgaacgatttggcctagatattgtgaggaaagacgctctactaaagtatcacagactttttgtgaaaggaggtcatccagatcctgctacattagtagtcgagtcacgggtcttgggtgtgttggttcgagctcacattcttcagtgtctcatcaatcacatttgtatttgcgaaaccatcatttgcgaagaaatagaactggttcaggaaattgcggatgtcaatgcaacacagaggatacattcgggaaaatggtaggatgcatgggaatctaagccaatgatcagttagatctgaataaggatcaactggcctaggctgattcacaacttacacttgctcctcacgtggttgttcggggttgtaccagctgacgttgaggaccttgtcatgctcctcttgggtctgtatgggcatgggcatataatcatccgttgatacaatctggcagtgtcagaatttaaaatagatcgatggaagggaaacagccctacctcctggaaatcatcactgaatctcttcttcagaagttcggcatatttgccaaagagtgtcagcaagaagtcatcaaagacccgcacggggaagttccacgtctattatatagtcagctatttcagcccaagccaatagagatgggcttgcctacattcatcgtctgcatgaacagagcaatcagattcttgatgttgagaatgctctcagcgttgtcaacttcatgaagtgctttcgatattaacactacagccgcttggcacatcgagtcccacagctcatcaatctatttagcataggtcagataattcctagaaggtccctccttgaaaagaggctaaatgaaaaaaggatatggcttcttacgtcgacagatgacctgagatcgggggctcttttcattgtggcccgttcgacaatggcaaatccagccatctcttccaagagattgtgcagactagaaccatcttcatcaacaagggtgatggaagacggaagcaagagctccttttgtcttcgacgggtggtcgcgtattcaattcggaatttatccatatgtcccaaagattgatggatatgcaagcactcgaacagcggtgtgaagtcgacttgcaggtcttcattctggagcaggtcatactcttcatcttcatcagacaccagttcgatcgcagagttcaaattgaagtgttccagataagggattttttgcgctctttgtttttgtcttgttttccgctggtctgtgtggaaaagcgcaatttccccgaggtattgagacatttctcggatgcggtaaagccaggtgttgagatctgacatcactgcttccgcaatggccctctgtgtcgctggaactgagcgttgtatcatgactgcaatcttgtattgtgtcacccccttcagatggacattttgcaattcctccagcgcccgcagcgctgcatagtggttcttctttgccaagaggtcatggacttggttggctagacgcaatacctccaaacaatcctgaatggcgcgactggtctcatcgatgttctgtcggtggccacgcgactcgactagtgctttcttctgctcggctagacgttcggtactggtttgaatagactgattcaagtccagaatttctcctgtcaagcttactgtcccctctctaatccgaaggagtgaattgacagatgagacaaactcctggtgatttgtgttgcatatactttcgatctcggactccttgtcgcccgcgaaccgggacagtgactgcaggagttgtggagtgcggttcccaacactgtagtctctgattgagggaatgagctggtccagatagtctgtgtcagagggtgagataataatctatagggacaagaagtcagtttcgtttaggtacattctccatgttgtagaggctggctcacttggttcaagacatgtggctcattgagcattggagccatgggtggcataatggctcagcttcatagccagcgataagcccaatagtctcaatacttctccacttgcagcttgcaaccttacatgtatccagggatgatctcaagcttatgttactcgttgacgtccgtaggcggtcaaatgttcgatctgccgctttctaaaaggctaatcccactctgtactagcgttatcactagcctgaaccttagccatatcaagtgtataacaatcttccttttccttccttttcctttttctatatgccatggtctctttgttctttagcattgttctaccacaatttgctcaatattcttagcagccgagagactatgggaccaacgcatctgataaccaccttatttacaaagtaagacagagagcagtgatctcccacactgttgacaagcgacatgaaacttctcattgagaaagatatgaattggatgattgtgatttactatctatggctggtctgtaattgtgaacaagattttttactatgatagtatcgctgatgaaggatcacagcgagtcattccacgggccttgtatgaagattggagacactgcgatagtgaaggctactagagaaccagcaagataaaggacgactcgtgcgctcaactaggctatattttactttcattgggggccaatcattgaattcttgttgggacttcgttcgttcgtcgttcgttgggatctattcagcaatatcttggtcgcactttgtgagtcgttctgctgcgctgtggtcgaactcaatgagtcgctctgtcgcggtatcttgttcgcacgcaatgagtcgctctgccgttgcacaatcacatcgtcccattggttctctcgaaacgtatcccgagtatgagtcgcggtcttgacatataaaagaactgtgcccaccaacgattcctctcttctcttttatttcccgtggctcttttttttaaaaataatcttgctgccatttactgctactttctatcactagggtcacactgccctttcctcgctgcttggactgaacaacttgctagcttgtatgtctacatgtctttctaatatgactctcgattcctgaccttctcattgatttagtattgaacatggaagggtcttctccaactcgaggatcgccatcgaagcagcttactgcattcaatccgatggggtatgatgctttcgctcaccgagccaaccctggctcccttcctggaatggcgaccattcgtccgactaggtaggatacttgtcctggttttatatattgatgatccaagccctaagtacgttaatgtgttatagtgatccatttgctggttggatcgatgagaaagggtctgcgcctagcatcccttcgtctcaaactaccactgcaagctctgcttcttgctatgcctatccagtgcctgctaccactgaccatgcgaacactcgcatctcaggcaacgagtacaagtactcgcctgtttcgcctcgggtgacttgcacccaggcagctcgcgcgtcaattggcaaattccagccctcgcctgtctcaccccaggtgtcccctgcaggagctggtcccggtggaatgctatactcgccttcccatgcccaggcatctcggtcactgaatcaaactcaatactcgcctcattcgttgactcgcgctcaggcgcgtttggcatctgagtactctcctgttcaggcaggtattgccaatgttcggtactcaccatcccgtgacgacattaactatgaatacaatacgacaccggattttttatctagattgctcgcagccgctgattctgcagtcggagataccaatgttgcctcccctaccaatgcactggcccatatctcccccagtaaccaagctcgtcgtgccactggtacaaccgacgcgtctccacgatctcccgccgctgggactaatgatgttgttgagaaacatcgcagctttattgtgcagcatgtccctctcgacaccccccaccgctctattgctatgatgttcccggtaagttacaatatgatctcatgggatggaccaaagctgactttaacaagatcgaggaatatccttcccttgagactgtttgtctcaagcaccttgaggctaggggcgtcttttctttttcgtttggcgatcttcgggaggctgtccacgccatgaacaaaatccgcctaactcgtcctagctggcgcgtcttcccggccagttacgacgacattgccactttcaatggatccaatggatccaatggagccgtttcctctgtctctgtgcctcagggtggtgcatttctgctttctgtgtacaccatcccaagcaagtggctcgtggaacccgtggaagagattgtcaaccaagtcgtcgcttcccttggcaccctgcgctcttgcaagcttaccgagaatggaacgagcatgagtcgataccaagtcgaatatttcaacaagcgtcatgcagcttatgctttttcctgcctcggtgggttcaggcttgatgtatgttgttcctttttttcctttttcacttgcttttgtgttctttgaaatgctaatattgggtttctgcagagtcttcatttcaatgtttctattgatgcacgtgaagaggttcctgttttgcctcgctatcgaactgccagctttggctcccctcggagccctgtgacaccgtaccacctcgtgtccaaggagaacgagatcgacgagaaggttgacatctctccagtttctgatgaaggtcagacgagtggagagcatgctattgaccttgaccgaatcaaacaaggactagatgttcgcagcaccgtaagtcttctcccctctgctgcaagaccggtttctcacattttgtctcgttacaggttatgatacgcaacattcccaacaaaatcacttcggtatgattatctccgttatcttatgaaaatcaggaaggctaattctatcattcaataggaccagttgaagaccatcctagacgagtccagtcatgggaagtatgacttcctctacctgcgcatgggtaagtgcttctccatggtttattgtcttgttcatgctaattcgacccacagattttacccatcattgcaagtaagttctgattgcttgataattgttggcttccaattttacttaccatttgtccttctagcgttggttatgcgttcatgaatttcgctgatgtgagtattttttgctggccttactttcgtcaggcatccttttcatctgatgtctcttttttctgacattatactaacataatttacaggcaattgacattgtcaatgtgagttataccatgtatcagtgtgtgacatctacttaccaattttccttagctcgtacacgctcgagagggcaaggcttggtatgctgcttcctatcttcccccaaaaagtgcattttcgctgactcgagacaattacaggcccgactgcatctccgagaagatagctcaagtttcttacgccagtttgtgtcccatccatagtcagtgggaatgatatctaacaagtttcaatagcacttcaaggtagggaagctcttgtgaataagttccgaaacagcaacgttatgacccgtcctcatgaagagcgaccccgagtaggtttaagctttcacctcccccccccccccccccccgcccccccccccgcccctccnnnnnnnnnnnnnnnnnnnnnnnnnnnnnnnnnnnnnnnnnnnnnnnnnnnnnnnnnnnnnnnnnnnnnnnnnnnnnnnnnnnnnnnnnnnnnnnnnnnnnnnnnnnnnnnnnnnnnnnnnnnnnnnnnnnnnnnnnnnnnnnnnnnnnnnnncatgaagagcgaccccgaggaagtttaagctttcccctccccccccctccccccccctccccgattccggtgccggtattgactgaatatagctcttccatgtcgatggcccccgtgcaggcaccgaagcgactttccccggccccaatgatgccagtaagctccgtcgttcggttgccagcaccactcagcaaggtaagatattgtgccctttggcttgtggacgtattctgaccctttcacaggcctctattcaccccggaaacgagctcccagtacacctcgctccaaccgcacgcgtcctcagtctggatccttcaaccagactcctcggtcccagcccttgaaccagactcctcggagtcgaccatcgtcgatccgcactccccggcagtctggcggacgctcggtccagcatggtcctggcgagttttctccgatgaagtcatctccgttgaaggcagaggaccgtcaattcaagccggagaaaaattaagctcctcctacaggggctatgcgaacgggtcatactgcagcaactggacatgacattctgtaagccaatggttcctgaccgatcagattgtttcatacttacacaatgacaggcacagagtctcgcgaccgctttgtttattgaattatccgacaaaatccaaaaaataacgaaaaaagaaacaaatccgacagatgatgctacactgacaattgcatcctcttccctctttgctccttcaacatcctcgattgttcctctacgccacgacagagggactcattcagaggcaacggcaaagggaagagttgctcagaatggctctgtgcaagccttgcctactcgctgtttcaaagctgagattgcacatttcgatggtctttcggaattgtgcctttaattgtgatctctcacgattcattgctcgagcttttttcccagcttttttccttttcatggcttctgcgtctgctttttattcttactctttctatttcgaaaatccgaaaatccaaaaacaggggatggagttagtcaaatgaaatgaatagttagttattgtctcccagtcacttacaaagtagacaggtaaaaccgtagaatccacgggaaaatcttttcatcttttccatctcaccaaccatggactccaaggaaattctggaagtccactcaatgctacatctgatctttcatcgcaacaagaatcaacatcgccgaacaaaatggtggaaatggctatccatcttgaaacgcgccactttggattccgcccgatcgggggtgaccactcatctggccacgcacgtaatcccaagatgttacatgtatgataaaaagaaaagtcctacgtggaaaaatcaagctaactgtattcttagcgctttctcaactgtcgttaccgataaccagttctcgacccttggaatcgtacttttagctgcgttggcccgactgtccaaagtcaccgggatcagtcaccagctgaagatgcaacctgtgacaaggtccaagattgctcctgtcaagaaagatcgggaagatcttggggaacgcattcgtcgcattgacaatacgccagtcaccccggtcaagatttcccagtctgatttcaaggtccccaaggcctccaaggtttctgagaagcccacggaaaggcctacagatgacgctgtttcaaaaagtacatcgaaaaagaagaagaagaagaacgctattgatgacttattcagcggtttattttgaatctcatacccctcttatgtacagtgttttcttttcttttgcggattccaagggatgtccaggcatgtattttgaagctaaaatgtttatgaagaatgacgagatcgcgatcgagagaaaataacctcgcccaataaattgacaccaacatgattggcagtggcccacgccatactgtagagatacttgggcgagaaaacggtccagatgaaaagatgcgtccggagggctgtacaggcggccatgacagaaaccaaggacacggcaacatggaatgtcaacagtgccgaggggtcttgtcctacgggactcttcggccggagacgatggctttgtgatgcccaccagataggccctgcccagttgctcgcaaaggtgagaactcccaccaacaccacgctgtagctgtcaacaccgttatatccactagcaaggtctacagaggagattgcattggatccgccaaacgcgaagaacgtcatatattggaagatcaaggttgtgattgtcacctcaatccctgtgaggttcatggaagagagaatgccggcctggattcggaaaatcaggaacagggggacgttagtggcacgggactgcgtcattaggaagatgtgcagagcttcatggattgtatcatatggtactacagagtctggtcagtaatgacctccaagctcagaggcaatctagcgcatgtgtgggcttacctcgggggactcttgatcgttttccggcaaagagcgatagtaggacaacgacagcaagtccgtaaaacacgagcctggcatgcaagaccaatgatagactgtagggccattccttcatgatttgcgagatgaatgtcccatcaaggagttcgggcgattccgaagtcacaaagtgcaatttgaacgtaaaggccaacgcggagggggccaagacacctagcctcaataatccagggattggtatactcccgagaagatgacgaccggcatccacgtacgcgaggataaaaagaccccagaagatttccgggtggcgtgcaaagaatgtgcgagcaatatcaggctcggccgcgaatttctgaccagtttggttccatcgtcgcaagagccgctgggtgatggcgagcacaagaatgatacatttgtcagaccaatataataataatccagagcgtttgtgtgagagcggctttgcagacgattgcgatttcatgtgcaggtagacaatccaccccgagcagatccaataccagaactgctgctcttcttccacatagctactagcaaacatcatcatcccacaggtgatgatcataagcgtcaaaaacatcccggaagatccgtgacgtgtgcattccttgtatgtggccggaaggacaagcaggcctgcaatccccgtgatcaacaagcccagaatgagtctggagacatcgtagttactggcagtacgactcataacttcctgtgcaatccttaaaaattgcagcaaatcggggccagctgtagagtaagaatcatctgcttcatccctacctgagagaagttgctggactcgagcccacgcacattgagctccctcaatacctgatggaagtcctggagcacaggatgtaggactatcggggccaaacgtagatccagggaatgttgttgtcaacgtgttcagcagctgctcagcattttgatataagattcgaagtttatgagaacctgttcccgagtcagttccggatctttcttcgcttggacgccattaggaatagattacataccatgatcccacatctctaaaaattctgggatgaataccccaagactgtttaaaggaattgggataccaagaagccccgccaaggtcggagcaatgtccgcctgctcaaccgtttggtagtactgcatatcacccgacggttccactgggctttctcttcggccacccaaggcttcaaacttgggtgaaatgaaaagtaacgcgggggatgtttctccagcagatgacccgccatggtttccagcctcgttcatgccatgatctccgcacaacacgaaaagtgtggattgaagatgatcttgttgctgcattgcggtatagatttcagtcaccacagagtccatctcgtgctgtttcggtatcatgaatggactaggagagttagaggatagagagcagctaataatgaaatcgggagctgaatttaccttttggggccagccttatgtcctatgtgatcgagacctaggtaatgcattatcagagcagaccagtcatcctgggcaagctcgtgaggaacgtgtcgagtcacattatggtctacttccgtgaagtcctgcgaggagaatctcagtttcaatactaatactgcggatacacaaacacctaaagtacaactgaccgacacgaagaagcttgtagttccatcagctcggtcaaacattcccgggaagagcttgagccaggtatcatccccatacatcacaagccgtcctcctgtagccttcaattgtgccaaccaggtgtcctggtatgccagtgttgacgaggtatccgattctgcgatattgagaataacatctagaaaagatggaactgaaccagttgtgatagcttttaatcgaggcattgtgacagttggagcgcttgcataggcagtgaatggcaatgcagcaccggaccggatcaagctagtatccaatcagtcacttgtttcgaacgaataaatggtgtatttcaaaagcgacacccacctctgtgtaaacaagaaacccgactcgttcgaatatacaaagtcgctatatgtgagcaccttgttagttactgatatagctcggagttgaattattcaaatcatacctcctcagcgcatcaacaaccatgaagataactttatcaaaagccgcaggcactatgacattctggcctgtttcatcaaaagtcgctaatccagggatcaacggtttataagggaagaaccctgaagagaaggtgagtatgcccacgggcaccagcaaattggcaatgactgtcgtccaactgcggaagcccgccatttttgcaaattgacttgatgttagctctggcagaacaaattttatgtaaagagaccccgaatcagctgcacctgtcgaactgtccgggggatccaaagggaggcagaattatatttatgatcgtcgcgcatcaccacaccgccttctcgagtaccttgtacaacattaggtatagttattgtaataatactattgacattagttcaaagattcaacaatcattcaggggctagaacttaacagcgccggatgaatgcatgaactagccaactgatcttgactagggttgcttgtcggtgaattaagaattagatctacatcgaccctgctccagccacagtgtgctagggttgcttttcttccactgagcaaaatccaatatgtcaagctttgaatgaaaggtatggtatatcaggcacagactataaaacatatgtacgtgaattgcaggtgtaattgtagactcccaaacgcctttttcttctccgccaccacatctcgtcaaatccattcattgccctcactcggcacaggcctcacttcctcttaggtcccttcttggtcgtagatagacgcttttgaaagacaatcgagttgcggggcttctggttgcgcttttgcacacgtgccggcttcttcttagagctcttgattgcgtcgatatccatctctgtgttgggtaagcgttctgcagttcaaagcaaaaagtgaagattcaaatgctggattgtcatagactaaccttcactgtcaccagtctgagccttggctgcttcggctaatacggaatacgaagttagtcggtatccttagaagagggatggtagtatacataccagcctcgtccaggtccatctttgatttcacaggagcttcaggccgtggctgtgatgcaagctcctgtagtttggcagcgagtctctcggttctggcatcaaccagtgggccaaagaccttcttgcgcagattggctctgttgcgcttggaaacgctggctcgaacacttttcgccattgtatgaggatagaagaaaaggataatgggaaggataaggtaaatatggtatcaacacttgaggatatagaccaagacgtcggatgggaaataaaatagtcaactgataacacaatcaacttttttttcccccccgataggctcgtcttatgtcatccggagaccgcacttcccaaggtacacctccgaggctttgtcgacttgacctcacccttttatggctggggtttgtggcctttctctaacatttcactccagtcaagagatgtatcgatgcagaacccttacaattggcctggctgaatcggacccttgtctttcgaggaaccctgaaccaagtccaccttgattgctttcgcactcctcttatctgtgaagcagtcatgtcgaccagcctgtcgtcagaggtcgcgacactgacagcctttatcaagccccttacaaatccacaactgaaagatttgttgaggtatgagggcctccaggtatccgggttgaaggcaaccctacagtttcgcattatccaacgttcgtcaactctccctaactcttattatgacttgttcatttgatcttcaaatctctgcttcacatcccattcttgcagcgatccgtacattgaccgacgatataggaatccaatctctcgcagaatctgaccctgtcagtttcgatgctctagctcggcgcatccgtgctactgcttttccaaacaccgtgccgtatcaatcacccgctagaccacaataccagccaccgcctgtctctcaatctcctgcacaggctcgatccgcgccgctcggggtttccatgtcacctcactcatactctggtccgagtgctcctctcatgaaacctcctgcggccgctcataaatctccaggtcctttgattttcaaagaaagtccattttatacaatcctagagcctttgactgcagtcgtggaatgtaaaggtatgtcactatctatctgtgaagcttgttgagggtctatgtctaattttacctagtacgcgaacaaacgcgggatagtgttgaactgaaggtcatgctatctcagcaagttgcctataggctgcaaacggactcaaatcttcgagtgatggtttattgcgccggtgattcaggtctcacacaatacaccaagtcggatatcgcatttccacatcaagtggagctcaaagtcaatctcgatgaagtcaaagctaatctcagaggcctgaaaaataggccgggcaccacacaacctgcagatgtgaccaactggatccgtaaaaagccaaattatcctaataatattgtcatgacttacgcattgacgcaaaaggttgagcttgttccctttatactcgatagagcatctgttaggccggttgactaactcctgtttgcacagaaattcttcgcgcttgccaacctcgtgaagcagcatccgactgatgatcttgtctcgcagttgaagacacggaaactcatctcgaaggagcaagtcttgcgcgaaagtaagatcccctcctattcccttgggtcagactatgctaatttcgatcctcagtgcgaaatcgcgcaaatgactcggacattgtcgcgacatcaagtgtcatgtcacttaaatgccctttatctaccctccgcatccaagtaccctgccgctccattgtttgcacacacaaccaatgctttgatgcgtcttcattccttgaattgcaaaaacaagcaccaacttggacctgccctgtgtgttccaaatcaactagctttgagtctctccaagttgaccagtaagtctaaacccccttcctcggcatatctgtttcttttcctaactggtcgtataggtacgttgatgacatccttcagtcaacgtcaccagataccgaccaagtcatcgttgaacccgacggcgtatggtcaagccccactgattccgacgcgacgaaattgggagggatgactcccgcgtcagatgacgatgacgacttgatcgagatcagcgaaccagggatgcccgttgtaaaacaggaaccgggacccacgaccgtcgccctggaacgaacacctgcacagtcacagtcacgagaggcatccaccccgtcctccgcgatgcgcatgtccagcaaaaaacgacctattgctcaggtcatcgaccttactgaaagtggtgatgaagatgacgagtcccctcttccacctcctaaaaggccagctacaagtctgccatcccgggctttttctcgtcaggattaccatgtcccgcccgccagcagccctctgaatggcgggtcgtacccaccatgaatttcgattcttatcctagtcaatctgacgaccaaagccttgatcgtttctctttctgatgcatatttccatggagtttctggcggggtagggggggagtcttcaagatatcacaagtggctacgtatctaggagggattgattgtatcattctagttttgaccggtcaattagcctggaaatatatttgaccatcactcttattcttatttacaaataacacaatatatgtttcttaactattttctcgtatagatcaaaaggccaatatcaggtggattccggcctggggttagcttagactccccaacacccccccggaaatccccattttccagttctcatcaacacgccctcattctgtcagccgggtcccttattcattcgcctcttccttagatcctgtcacctttgactccataatgtcattcgattcaacttccccgtcaaatgccgatccaaatgcccgcgtcttcagctcctcatgcttcgacttcctactcatagaattggtgccaatggccgagcgtatggcaaaggaacttgcgacggagggacaggaagctgaagatgaagaagtgagagagacgatattctttcgtctagagtctctgggctatcgtgttggtcaaggccttgcggagcggtaagcataaacatctccttttgcagcccctttgcttttctcttgcagtcctacagcgcgctaaaccgtgtcgatctctatagctttgcccgagatcgccctcgatttaccgataatctcgatgtgatcaagtttctctgcaaggatctgtggacggtcctattcaagaaacaggtggataatttgaaaacgaaccatcgggtatgtgcaatacagaaactgctgtgttggggagatgcgacataaacagcacttgcacggagatgtttaaactaatatcaataaatagggagtctacgttttgacagacagcgcgttccggccatttggtaggatgagcatggcggtgcggactgaagcaatatccatggcgcaggcagtaagcatcccctttgcaattaatgaggatttctcggcttatgggttgacctagtacctctggtttccttgcggtatcatccggggcgcgttagcgaatttgggtatcaacacgaccgtgcaggccgagacctcggatctaccaggtgcaactttccagatcaaaactctccagcctcggccttgaacatgaaaatggttgcgcctgggcctgggctagcccttttactcaaccaatttacgcctactcttatgacttatgacaattccattttaccaagaccttgtggttcctgcgatctactacaaggatcgttgatcgatcatcatctaagtcgattggctacgtgagacagaataccgaaaacacgcaaaaatgaacagtggaatctgaacccttgaaattgcaggttggttactatatctgtgtgtcaaacctacccatctgatttcgggccgtacactactcgtgtctgctcattgttcataaactcatggtctcacatttaaagcctatctttccgggagaagattgattagcaacgctctgccattttctagtgtcatcgcagccgtggagaaactagcgagaaatatatcgacacaaagaggcccacccgatatacatggtgcacaacggacattggggggagggaggtcttactttggtggggagttcttagcgaactcaatgcccttctcgatgttgccctggagtcccttgatgcaagcctcgaggagcttcttctcctgctcagtcacgccgtcaaggatgttaatggccttctcggcaccgttgggctagatcgagcattgtcagttagttgttttaacacattggaaaattgaagacttacaccgagttccacgggagtggagaagaagtcaagaccggtggccttggcaatctcatcaccgccagcaacaccgggcaggtagacgaaagtaggctcaacaatgcccttctcgcccttggaagccttgatgatagcctcggcgaatctaatatttgtcagtcaccgtggtagctccgggttagcaggtgaaacatacctgaaaccggcaaaggccatagacagagtagcggaaccagcaccatccttggccttgacgacctcgtcacctccgaattggacacctgtgaaatatcagtaaacgcctcccacggaaagggctgttcacatacgggtaacaagagcatcgtatcggtcagcagggatctggaagctgggggaaactttgctgaacagaggaacaatggtctcgccagagtggccaccaataacgggaacggtggcatcagaggcattcttcacgccggagaactcctgagtgaaggtctcggcgcggacaacgtccagggtggtcacaccgaacagacgcttggggtcgaagacaccggcagccttgaggacctcggcggcgatggggactgtggagttcacagggttggagataacgaggatgaaagccttgggggcaaactcggcgatactctcgacgaggcccttcacaattccggcattgaccttgaaaagatcatcacgggtcataccaggtttgcctagatgttaccatatacgttagcaaaaacaccacatcccgatctgtggataatctactaacggggaatgccggcggggatgacaacgacgtcagcaccggtcagagcaagcttcaatccatcatccttggggaggtagccagtgattttctagtcaaattgttaacgggtttattatgatgcttcaggagtatacatatacgtacggcgaccgaggagatgtgagagagatcggcagccacaccgggggtgttgacaacgtcatagagggccaggtcatccacgagaggggaagccttcagcaagagggagagaggctagagggtcgattagctgaggttcataagaaaccctaggaaggataaatgaggtggggggacatacctggccaatgccaccagcagctccgagaacaactaataacgaatcagcaaatgatagacaaaacggctgaataacataccagccttgaccatgatgaattaaatgcgtgtatttgtagagaaagagaggaggagaggaagaagacaggagagaaatggggaagagagaagcttggagaggggaccggccgatttataagaggggcaagtgctgagaggggcaaccccggaatactggaagtgttgatgttcggagttcctaacatgtgaagtgatgaggtgacgatatgcacctttattcgacttgatttgcctttcgacttgattttgctcgctttgactatcttctactattttggactgtgtgagatctagtcctccaatcccccatgtcctctcatcgctctataaagaatggccaaggtaaaaagctatagacctttctccagactctccggcaattctcgtcccttgacctggacagttccacacttccccggggctaccgggttgttatatcgggaaaaggcggactataattctcatctacaaccggacattgtggctcggcccgaccagtcggttgtgaatcaattttacttcttcccttggctagtttctcttccgttccgattagcagtaggaatcgttctttccggggaggggtggggggagatgatttctctcgctttagaaggtctcagacaggacacagattttttttttgctgccctcggagcaagattgctagattacatggtttccaagttcagcatggcgttttacatacgcctgtcaagtctccttcccagatctcagatccttcatagtccacaattcagccttatctcgagaaaaccttactcggactcctcggccttgcgggccttggagccacggggcttctgggcaggagcatccttcttggggagctgcgagcggcggacggcgctcacacgggcgacggcctcctcgcgaagatcggcacggtagttgttcttagcggttctgtcggcaacacccttgtagatcctgtaaagcagataatgatcagcactggatcgtgaagaacaacacacaccatccatgtcttgaaaaacaaaggaatgaaaaataggagccgcttacttgcggttggcggtgctgggaccgtaggtgacagtgaccaagttctgagcgggctgctgggggttgctgggcttcttggtgatcacggcgacaccgttctcagtgggctggacaccgacggcctgaaggtaatataattagcgccacaaatctatcttatatatataacagggacaacatcagcagtatagaacttaattaccttggtgttggaataaccggcatactatagagcgccaaaagagaccgttgttagccatgcattcccggaaagaaacatccattccgtctaatccccgaggcccgtaccttgtaggagtgcttgttcagcaggttcagggggtcccgggagaactgggagccaccgccggagttgcggttaaccaggaaggagttctggttgcctattccaaagattgatgagctggagttcggtttccaaaagctttgacaaaaattcgaaatgaaaagttgcggagggttggacatacgggtgatctcccagaccaggtcgttggagatgtttgaggacattgtgatgagaggggatgttgagttggagaattgaaagatcgaaatcgctatcaaaaccgtcttcacgtcgatccaattgtgtgtcttgaatgccaagacctcggattggacgaagtctcgctaaggcggctactttaggaataggctgagtgccttggtgcctgatgccttgatacctgaatactgctgcctgtcaaacaaggcagaactaacaacttccggcgacctccaggctgccaataatatgaacgcgatgctgacgttgccccctccaaactctactttctagtgatctcctatgccttcttcatcgacggcttattgcctgatggaacacatcatcttttagtccttctttggcaaagaactctcgagaggcgccaacttctccttacaccgcaatatactactactccgtacacgcccgaatcttcaccggtatcactcatcatcatgacctacattctcttttatttcctactcttttcggttatcatcagcgggacaggtaggtcaagtgtctttccaacccgggaggaaacaaagcaatcattctcaacggatgtggttctaattacactgtagccttatacctcactcggtcacgatggatgccgttaatccaagtgcctgattatctctatcaccgccttccttcaagttttaccgccgatctcgaggccggtctgagctcgtcgcaattcgacattactgccaatcttgcagacggggattcgagggctggcttggatcaacgagcaaagaaagaagtgatcaagattatgaagagtcagaaggtcgattttgatgaagcacggcgcatctacacagagcaacgatttgcaaagaataacatcggaccggacggccggccaagggaccctaaattcgtctcattttcgtgatttgccttcaaccatatcaccagtcctagcgtgttttgtggccattgtcagagcggatctctcgctagcagaatccgtacaaatagaggtcccagcttttgaccggtaatatctcatctgtgctgtcagagcgctaggggtaattattttatcacttgagcgggcggatatcttgtgtctgaaatgatccttggcaacttaaacctatggagttgacgtattatcaaaatcaaatacaacacgtctgtctgtctcgtccgtgtctaagtcacttaatattacatatggccattcagcactgccaatagccagccagcgccaaggcacatttcgatccacctcctcgcacccccataaacatgttcaaggtagtcaagcaggagaagaacatctaacgcatggaccacgctttggtcctaggtcgggaatagctttggggaggagaggcgctctcaagactgaaaaccactaggaatcatcgactgcctgcatatccgggctgttggaagcccggtggcaatgaaggggctcccgctggaggtccaaacccaggtggtccaaacccagggggagctgcagcttgtgggacgaagggcggttgacctgcaccattgaatccaggtggtagaaacgtctgtggaccaccgtagccagcttgggaaggcggaggtcgagctgggagcccgggaggtggggtattgattgaagggacgggaggtggaacatgtcggtttggagggggaacggtctgatagggcattggagggggtgcactctggtagggcatagctggcgggataccccggttcattcctagatcgggtgtttgtgactgagccgtaattaatgggcgagagctatcgccgttcgacatggcaggtgttgctgatacgcccggcgcagcgccagggaactgcgaaggttgctgaggttgttgagtcggtggctgtacgttgtgtttgcgagcctgggctgcgagcattcgctccgcttcatccccatgtctctcgcctttcccatctttcttgtacgcatactgtaccgaaacctgtttgttcatcaggtactggccattcatgttggagatggccgcgtccgaggattcgaaatcggcaaaagaaacaaatccgtatcccttagagagattgttgtcatcacgagcaatctgtaaagtaatatgaaaaagagactgttaaaaatttccatcttgttcgtattgggggagatctcactttgggcggattgacaagattgccaaaccggctgaacgtatcaaacagaacctgctcggcaaccataggatccaggttacccacaaacagctctgcgccgatttccacggtcttttgtttatcggctgacgctttgttaacgcgaataggcttgctatggagacggattccattcatgatcttcgatgcatattcggcatcttcctcgctgatgaactcaacaaatccatacccctggtgtagctgcgtgacccggtctttgggcaggtggacgttgacgatgcgcccaacctgtagcatcagctcccatacaaggctgtccgaaacccgttcatcaaggtttccgatgtacacggttgcctctttatcttgttccctggggtaagttagcatcaggtccctgtggggaggaaagaaggtcttaccaatgtcttgcgttagacatggcgccggtgtattagttggagggagaggggagaaaaaagctccccctagcggaaaaggactcaaagatccgagaaaaagtaataggttgtgaaactctagcgaaacctggaccaacaaagtagactaatttgagtggtagtagagaggtaatgaggtgtgaaagaaagtgttgaagtgaaggaaacccggagttgagggatgatcagtgacctttccgaaactttttgattccgcaaatcctccctgttttccacttcatccatcaaccacatttcctacttgttcacttgaatcgaccgtgaaccaatttcaatttattcgtgttgatctccttgaaacctttccaaaatctactttcataaattcacaatggttcaattctccgaggagaccaaggttagttacaaccccgatcctccttgagaccgggtttctaactctcgctttttgatctatttaggagcgcatctcgaaggtcattgatatttctcgggtcgcaattcactagtgagccttatagcacacctccacgccatcctccgagctgaccggcgataaccatctagcggatacttgcctctgattgtctatctgggtatgtatatatatatgcctttggtattctcaacacaataagttaacaaaacaacaaaaacaggctacacctatagcgagcccaagccgacattgttcaggtacgcttcaactccttgaattccagctgtcatgactaacttgatacctagattgttctcgcctcttgcgtaaactgcacgttgaggatacgcggatcggatggatatggcgcagtatattgttggatgacctttcaactattccctccgggagggatggtaggttcgaatatctggataatcactgtttgcagcttgtgaaagctatatgatttttgtaattttaagtctctggccgaatattgtccattttggtacagaaatgctgtgtgatctgcgataattccggagtaaacaactgagctttgtataaaaaagaagaaaatctggaggtctggagattaatgtgtggcatatgttactatacgctccagggctaagatctacggagttactcggcagtcacatgttctgacattattattcttagaatattctccatctatcttctccctcctctaacattgttctccacacactctcttcctctcgtctctgtctctgtctctgtgtgttcgattttcctagcttcgtctctaaggcaggttcatgactagtcaagatggcctctcgtcatcctttgtggagcccgtagcaggattcacagcgggaatcgtgtcaactctatcgctacatcctcttgacatggtcaaaacaaggctacaaggcaagcatcgatattatcttggcgctgcttggggtatagaataactaactccgtcttggtatatatagtcgatcgatcatcttccgggtttgggacttcactgcaggtcattcgcaagatattctatcatgagggtggctgtgccgctttctaccgaggacttacccccaatcttatcggaaattccacaagctggggtttgtacttcttatgctacagcagcttgaaggatactattcgaatatatcgcaaggagagcgagcagattctcacgtcgtctgattatcttctcgcgtctggaagtgcaggtatgcacatgtcatatctaattcagcatcgttcctccgttccccaattaatctttggatttccataggcgttattacgtcggtcctcaccaatccaatctgggtgatcaaaactcgcatgttgtcaacgggttcccatgctccaggggcatattcttcgtttgcatctggagcaaaacaaatataccaattggaaggaatacccggcttctaccgaggtctcgtaccagccctctttggcgtcagccatggtgcccttcagtttatggcatacgagcagttgaaacttttcaggttgcggtcgatgaataacatgggctcaattgagagcagtcgcttgggcgccgaacgggtgctgggtaatgttgatttttttgccatctccggtctatcaaaagtcttcgctggcagtgtgacatatccttaccaagtaattaggtcccggttgcaaacttacgaggcccatctgatttaccgtggggcgattgatgtcatttcccagatatgggcccaagaagggatcgcaggcttttataaaggtcttggtccaaatctgttccgggtacttcccagcacgtgggtgaccttcctggtatacgagaatactaaggtctacctatcccagctggcacaaaatccatgaaatacttcctgctaatccctgcccattcttatatcaattgatcctactggagccttggatcaggttagcaacgtcctgtatattcatcaatttataacatcttcggctgccatatgccgatctctaatcttttcacgatcttagctgaaattccgcagttaaagtactatatataaccagataaatgaaggaaggattctaaagtatagtcacgagtatacaattggaataagtaaaagtctcaaaagtctatacatgttatagcaaccagaaaaggcccacttccgtgtatttctttgcttcctatattatattagtagccagtagccacgtaccgtgataatacaaggcctagtaggataactagatcttggagtataacgctccttttaacaattatacttattttaccctttggactaggatcttattattcctaccataaaaagaaagtctcccttttattcaatggatggctactattcctccaaaggacgagaagagcgctccacagtcgccgtcaagttggaagactgcgatgctctcggtacatacgatgcccgcgtgcagtgaatatagatagtgtcttcaggcctcgcttatacaatcaggattagatagcctggaaatggtcaaaagcgtagcatattacggatagaattgatcaagacgaagagaaagcttctgagaccccagagttggacgcattcccgttggaaattgaaaatgataaaatacggtttgaagctgactccgaggctgttcataataccgagaatgataattacgataaaaatgacgatgaagagtgaggatagcgacactgataatccttttgcgtaagatgtttttgacacaaagcgataagaagtagtctagttattgtaaactcaattggtttcattgagtgtcttcggtcatgatagagactggtttaaattggttctggtacatgtatccctcgggtacctggtcatatatgaaacctctcaccctcagatttggactctgtagatacatgagtacccgatgcacttatctatggttgcgaagtctcgaatgaagatggaataaagtatgaaataggtgctgagctagtcaggccgagagcaaactccccggactctatactgttcagtccgcactagtactccaggatacacggtttgaaaatataatactgtgccgtgggatgaaagccatatgccaggcaccaaggcacttctgcaccttagataaatccagacccaagaccaaggagctcagctgcttcacgagaatagctgttgacattctaacctgggctctgactgagtcacaagctgccttgccctatttgatatgcttaagcatcgcctcggtacaaacacggaatcatagttattaaaggttggataagttgtactcactttacgattgacggggtttctggatagacaggcgttagtgcgttcaaaagctatgaaacttaccttcgcagatagagaattgccagcccttcttctcattatagcgagtataggggatacatctgagagagagagagagagagagagagagatcggttgcgtatcgttggtgtcttgaggtagcgccaaaacttccgcaggtcacatagatgactgtggatgtgtttggtttatcttagtggccaaggcttcctgctcaggtggcttctggaagatatcaaaaatatggaagctgcgtatatactaggctccataactcaattggttagagtgccatgctgatgacgagggaccaaaaatttatccgtaccctactattctactttgataattgcatagatacagagttagagccatcaagttggctttgcgtctggagtgagttatcctcgaatggtataaacttcgaatgctgactagatttgtagggcattttatccctccagcaagcttgtgccgcccaggttgctacttctaccactcttggcttggcaattgggactgtgtcgggtgccacagctctatcgtatgacccccatatcttgaaatgataatgtagtatgctgactggaactgcagcgctatggcaaatgtgcccatcagtggtgctctgctcgagaagtacgggtacctttccctgtcaatattttcaggggtatccttgctactaggtggcttgcttttgattgctgcacgtctagtacagaacagagagcttcgagctatcgtgtaatgcttggccattgggttgaatttgaaaaagtgagaggtgaagctgatagaagatgggaagatcgatcaaagtccaaagacgattgatggatactgatagaagaggatttgacggaaaatcgtgcagcatattttccactagactataacaaaaaccaatgttcctgtttaaggcttaaatgagccataactatcacattctgataagatttatcgaaaaacaaaaaacaaaaaagaatggtcccagagggggtcgaaccctcgacatctgcgttattagcacagcgctctaaccaactgagctatggaaccgaatatggaatacactcagcattttttacatctttgaggcggcgggtgcaaggacaccaaaatacaatcttgttctacattcgaaacgtcaacttcttcggacgcgaatgccagctacaacgaccactaccagtctttctttctgcatcatctgtggattagatgaatttttcgcgggggccatatcacaatttacattattatttatcatatgactctatatatagatcgttgaccacatttacattgcttgctttcttgcttgcttcatgcttgctatctggctctttctttttttggttcttttctttgtgaatagattttttgttagcttagcgaaaggtctgatgtgcaaagtttatagagtggtcagctataaccaggctgctcccacttctcttcttcctctctctatcgctgtttcttaattaaatggacataggcataccaactaatgtaattagtatgaagtgggcggctggcctaatggtaaggcgtttgatttcggctgaacttgattcaaaaggttcgacatctcaaaaaattgcaggttcgatccctgcgtcgctcatccttttttattttgttcaattcaataccttcttcaccctgcctgaaatttcagcaccgccttcattgcagaacgaagtgaagcaattaaataataacctcgtatatatgtcacatgattggttatttttattctataattgtgccaagtgcctaatatacaatatatatagttattaatacatcctacttaataatcactcaataataattttagtctttattacctactttattaatatcctatacctgtaaagggacgaagctagattagaattcaagctaactaagccgtttactattatctaaaagcttaaggaaaggaaataaagcttataggaagaatgtcaggaccctagtactaagaaggctgatgcctgagattttgcacctatcagggtatatagggaactatagactaggcaggagccatatatactacctatatagcccccttcttattatatgacctactacctatatattatccttatatactacttcttaggagaagtagctattagtttctaatatactactatatatactactatctctatttcctaatcctctattatatatagtattccctnnnnnnnnnnnnnnnnnnnnnnnnnnnnnnnnnnnnnnnnnnnnnnnnnnnnnnnnnnnnnnnnnnnnnnnnnnnnnnnnnnnnnnnnnnnnnnnnnnnnnnnnnnnnnnnnnnnnnnnnnnnnnnnnnnnnnnnnnnnnnnnnnnnnnnnnnnnnnnnnnnnnnnnnnnnnnnnnnnnnnnnnnnnnnnnnnnnnnnnnnnnnnnnnnnnnnnnnnnnnnnnnnnnnnnnnnnnnnnnnnnnnnnnnnnnnnnnnnnnnnnnnnnnnnnnnnnnnnnnnnnnnnnnnnnnnnnnnnnnnnnnnnnnnnnnnnnnnnnnnnnnnnnnnnnnnnnnnnnnnnnnnnnnnnnnnnnnnnnnnnnnnnnnnnnnnnnnnnnnnnnnnnnnnnnnnnnnnnnnnnnnnnnnnnnnnnnnnnnnnnnnnnnnnnnnnnnnnnnnnnnnnnnnnnnnnnnnnnnnnnnnnnnnnnnnnnnnnnnnnnnnnnnnnnnnnnnnnnnnnnnnnnnnnnnnnnnnnnnnnnnnnnnnnnnnnnnnnnnnnnnnnnnnnnnnnnnnnnnnnnnnnnnnnnnnnnnnnnnnnnnnnnnnnnnnnnnnnnnnnnnnnnnnnnnnnnnnnnnnnnnnnnnnnnnnnnnnnnnnnnnnnnnnnnnnnnnnnnnnnnnnnnnnnnnnnnnnnnnnnnnnnnnnnnnnnnnnnnnnnnnnnnnnnnnnnnnnnnnnnnnnnnnnnnnnnnnnnnnnnnnnnnnnnnnnnnnnnnnnnnnnnnnnnnnnnnnnnnnnnnnnnnnnnnnnnnnnnnnnnnnnnnnnnnnnnnnnnnnnnnnnnnnnnnnnnnnnnnnnnnnnnnnnnnnnnnnnnnnnnnnnnnnnnnnnnnnnnnnnnnnnnnnnnnnnnnnnnnnnnnnnnnnnnnnnnnnnnnnnnnnnnnnnnnnnnnnnnnnnnnnnnnnnnnnnnnnnnnnnnnnnnnnnnnnnnnnnnnnnnnnnnnnnnnnnnnnnnnnnnnnnnnnnnnnnnnnnnnnnnnnnnnnnnnnnnnnnnnnnnnnnnnnnnnnnnnnnnnnnnnnnnnnnnnnnnnnnnnnnnnnnnnnnnnnnnnnnnnnnnnnnnnnnnnnnnnnnnnnnnnnnnnnnnnnnnnnnnnnnnnnnnnnnnnnnnnnnnnnnnnnnnnnnnnnnnnnnnnnnnnnnnnnnnnnnnnnnnnnnnnnnnnnnnnnnnnnnnnnnnnnnnnnnnnnnnnnnnnnnnnnnnnnnnnnnnnnnnnnnnnnnnnnnnnnnnnnnnnnnnnnnnnnnnnnnnnnnnnnnnnnnnnnnnnnnnnnnnnnnnnnnnnnnnnnnnnnnnnnnnnnnnnnnnnnnnnnnnnnnnnnnnnnnnnnnnnnnnnnnnnnnnnnnnnnnnnnnnnnnnnnnnnnnnnnnnnnnnnnnnnnnnnnnnnnnnnnnnnnactattaatatattatattccctctataaagccctttatatcttacctagttaataggctgtatacctatataatatatacctttatacttattaggttatttcttctaatcctatatttaatagcctaaaacctagtctaatataggtattaaataatatagttaatagtattaatatatttaggactaaggtttagtaagaatttagctacttttctaattacttttataatatttaatcttaagatagtagttatatattatataaatctaactttagcttaatatctaacgtattttactactaagtaggctactactagtgagtgggccacctatctaaaatatgtcgattaatttaaacccttcttctttaactactaactatactactaattcgctcttaatactttagaaatttaatagagtaagagggtaggatcttactagctatctaggcttttaagaatcaagaaatttctttaatttataagatagtatactattttaaaatcccttatactaccttataatagtactttaccggtaataccttttattctaaaatatatactaataactataagttaactaaaagtaaggaagaattactttaaaaatagatactctctatagattcttataaagtagtctcttagccctcttttatataagaaatagtaaatcttcttttctattaatatagaactactctaatctctttagttaataaaaattaggttataaaatttataaaatagtaccttttcctttcctcttaattcttaaagtattataattataagtatataaaatataaagacctaaggattattagagaatagtttaatttagtttaaaaaactattctttagtatagaattaaattagataatatttataactttaataagataggttttactataggattaattataatagtaaaggttataattagatataaatactataattagtaattacttttataacctagaaattataaataagtaactataattaaatatataaataccttaggttaggtactatctttatatattatttttagaaataaaatatttattaaatcttagtttaatagccttttaaagaattagtattttaaagttaatttaaataattagatttctaataagattaggctttattagctttaaaagctctttattcctttaactttattatatataaagggaaggtattaacttttagtatttaatagctatagaagttatttaatcctaaagtttaataaaatttataagtaaaataatattatactaatttatatattactatattcctcttaccttttataactacttaatattagctattttataatattaaaataggtatatagttagttaattaaattaaaaatataggttaagattaattatattaataaacttaaattctttaaaatatacctatttatataaactaaagcttttaaattagagataattaagaataacttcttagtagttaatttaataccctttttatttaattaaatacttttaaagctaagtatttagctttaaatacctaccctccctttaagctaaagtaataaattaagttagaattttatccctaaaactctatttatagagaaagaactatattaataagctttattaattaaagctttattttatataaagtcttatagcctactaagtctattaaattatatattagattagtttataaaaggcttctatcttataatataaggtactatcttacttactaaagaaaataagaaactatatattattaataagaaataaaagtaaaagtatattagatcctagaggtagatacctactaaagaaggcctcttagtttaagaagtctctatattaattatatagtaataggaagtaactaaagggcctctctctagctctagtataccttagggatcggccattcagctatatatacagcccccttagggatatagaatatataggttactagggtatagaagagaaatatatctagatagatagattatttagttaaattaatttaatggcattttagttaagatatttatatttaaaattagtaggttaggataggtggcctacttactagtagtagcctacttagtagtaaaatatattatagatttagcttaatatagtaattctattaaatagttttaatagcttaatatttattagagaattaactttttaactaataattagattatattttaatactatacttttaatataactatcttagtataattaaagcttcttttagtctctatcttataaaatatagatattaagaaactaactaatatctaacttatataattcctagtatttttttatctattaatctaaatatattatttaattaatatattttaggtgattaataataatattattaatataaaagaaaataataatatt

SEQ ID NO: 157 - DNA, 659891 bp, Penicillium roqueforti
  misc_feature (753)..(1077): n is a, c, g, or t
  misc_feature (4516)..(4816): n is a, c, g, or t
  misc_feature (116281)..(116429): n is a, c, g, or t
  misc_feature (229298)..(229454): n is a, c, g, or t
  misc_feature (257469)..(257712): n is a, c, g, or t
  misc_feature (315638)..(315769): n is a, c, g, or t
  misc_feature (443437)..(443539): n is a, c, g, or t
  misc_feature (445412)..(445925): n is a, c, g, or t
  misc_feature (511905)..(512129): n is a, c, g, or t
  misc_feature (527126)..(527811): n is a, c, g, or t
  misc_feature (564595)..(564921): n is a, c, g, or t
  misc_feature (590078)..(590428): n is a, c, g, or t
  misc_feature (649477)..(649666): n is a, c, g, or t
ttaataagttctttagtagtaataagtctctcttagaatactacttcggctttaaggacctggattctttcttagataagttaggtagtttccacggttactttaggaggattaattagattttcctaggtctaggattctattcgttcggttctagtagttagagaagtagttcctattttattccttagtcggggctgattcttagggagttcggtatttccctaggattaccgataggttaagggagccattgtatcttaggcagttaaagaagaagaattagaattataaaggtatacattatataggtatacggcctattaaccgggtaagatataaagggctttttagagggaacacaatgtattaatgatataccaagactaattcttactaatctcggaggggcccctagggggtcctaaactataaggaaatctatctgcctatgttcatataacgaaccccttacggatcgatatcgaaacagatgtatgataatatagatattccttcccgagcctgtgcaggtttacatgtatttccctcttgtacggacctttatctgttataacaatccgctgtacttcttaagaaagaagtaagcgatttataggctaccaacgagaagcagaagcaaaagtgtactagattccggaggcagatacctgctgaagaaggcctctccgtttaggaagcttctcaattaattgctgcgccggtggaagtagctgaagcaccccccccccnnnnnnnnnnnnnnnnnnnnnnnnnnnnnnnnnnnnnnnnnnnnnnnnnnnnnnnnnnnnnnnnnnnnnnnnnnnnnnnnnnnnnnnnnnnnnnnnnnnnnnnnnnnnnnnnnnnnnnnnnnnnnnnnnnnnnnnnnnnnnnnnnnnnnnnnnnnnnnnnnnnnnnnnnnnnnnnnnnnnnnnnnnnnnnnnnnnnnnnnnnnnnnnnnnnnnnnnnnnnnnnnnnnnnnnnnnnnnnnnnnnnnnnnnnnnnnnnnnnnnnnnnnnnnnnnnnnnnnnnnnnnnnnnnnnnnnnnnnnnnnnnnnnnnnnnnnnnnnnnnnnnncactgggagtagtagggtgctagagaggagaacaccatggggtgactactgagaagagaggtggaaaggtgtctgcgttgctatccaggcctcgggagtgctttgatgtcacatagccgcttaatcatcctgctctggaaacccccactgcattacttagttaactaaaggggggtcgcactggccaaggggggcgcgatggtacaattcaataataatatcgggctgatcaaaattaactagttaagggttgtggcataagcaggtaaacttgaaagtagattcagaatatatgggacatgacagggatatgaagtattataattgcttcgcttcgctctgcaatgatggcaacgtagtgctttcagataaatttagaagaccccaagacggacgttcgctctggcaactcgaaggggccatgctgaactacctttttatggccgattgcaactatagaacctttctctgggcccatctcataaaaaggacctctctccgagcgcatctcgtataattggtggctgtggtgcaattcatttagtcggttccatttattatcggcagcttccacaagcgtcgactgatgcgctgaaggccattggtcaaatcgcccgtgggctgcactattctgatcccgattgagtgatttctccttctgtcgacggtggcgaatgcagagcccacaacaaatggcaatcatcaacaccccgcctacagtacaaccaacgatgatgccaatcttgacagctgtggagagaccattgctgctagtagttgagctgcttgtttcggtatccgtcttggtcggtttcaagttcgaatttgtaggaatcaaattccaggtgttcttccaggtgtttttccaactattggaagaccccgaaatggtggattcattgtcccctattgtcactgtattgacaataaaagagccatcaggtcctggtgcttgggccaaaaaccacttcccaccaagccaattaacgccgacaaaggctgcttggagaaaagcgcggcctagagcaggggtgctgttggtggccatgcatgggaagtattgcgtcggcgtcttcacaagcgggggctctagtgtgagatttaggagagcgaaggggaccctgatcgtgatttcttcgttattgcggctattcatactaaacgtgaatgccaaataacttggagaggtcacaattttgtcgtactgcgcgtcggacgtgttccaaaaatagaggccataatcaggttggtatatgacgggcaactcagcggctatcgcatcacatgagcttcgaggcagatatatgtatggattgactgggtccacaacaatcttgagaccggcatccagggaggaattgccctttgccaagagacctgttttgttggagtaattccaaggcgatccgccttctgccactccaatactcatatcgtacatttcgatcgggaagcttccacttgaaaacgactgagcggacacggttccaatgaccctattctgatcatagcctcccagatgaagtgagccagggattcccagagatgcggagccaatatgcattccataggaatatgatggtattttcgtggacccctcctgctcgtagaggtagctggtgatgaaggtcgcgttgattttgatcgaagccccaaatgtctgattaatatctggactcccaagagaaagggttccaacctgtaaagggtatgcttgtccaccagggtaagtctgccatccagcagatatggtaatcaagtcgacatcaggaacgtgagcaccgtcaatggttatccaatctgttcctcgtcgtgctttggcataaactggaactgcgtccgtacatccccagtccacataaccccatgttccatatggaggtagtgaaattgagttatcgtccaaggtgactgatacgtcgctgtcaaaaagacccgctttatccccatagcataccgacgagagggacttgttgtcacatatggaaggtagtaggattttactttcccaactacctcccgggtacaacgccactaccgatgaaggcacaacaagttcagagtagttgcttccgatagacaccgtgaccgcttgccaagggccatcaggtccgaactttttatcagaccaggtcatctcccggggaccagaacagaggaccttatcgaggcaaaggatccaaattgtgaaaacacattgttgtagtcctctcattcctaagggggaaatattgttagcgattattttctcccaagtatatagtaacggtgttttacaagacaggactgacttgaatcacagctgaagtgacgatgtaatttatcggtttgaacaatgcagtaagcaatgaaggccacaaagttaagcttcaagtatcagacgaagataggtcttcattcactcgtcactgccactcatagaatatcatcagacaattagggtagagttccgagttggagatttagagattttttcaaaagtcaacttgggtgaatatccggacaccgtacagtagatataatccagtaccatcccaagcgccagatataatatagatgtttctaataataagaagaattgccaaatgcgattgatagttagcgccaagatgtgatgaagtcgggcacggaccaagacaccccaccgtcgaggcgttcgcttttgccaatcagtcgttattagagattctagcgtgtctcagatcatgcatcgacagcgcttagccgcccatttatgactgctgcaatcacctgaggttgtccctggggaaatggacagctgagggggtcgttttctgtcgcatgcactttccgaccttctcataccctccctcttacatgcattttgatatggactgagaactgcaaacacatcgaggttttccttcgacatttacgtgaaattgaggaatatacctgtcaatttttccaggcgataagcgaccatgttaagtatggccacaacatctccgagagtctttcgctccatgttcatagctttgtccgctctattcggctttgtgacattattgcgactttcatacaatgcgcctctggatgattctaattcgcacttcgacggtctgtccgggaagcaagtggacgtggactggtctcgatttgcatacacccaatatgctaccgacagatcttatctgtgcaactcactcatgattttcgaggctcttcaccgccttggaagcaaagccgatcgcgtgttgatgtacccatacgatttcctcttgtctgagaacgatagtttgccggaagctcgtttacttcgcttcgcaagggacgaatatgcagtcaaactcaagccaatcaaaataatgatgaagggtgggggaggtggtaaggcatcccaacttattacaaaatgtcagaatctaggatgaatactgtcatttttcatccctgatacagttggatcacgtgactnnnnnnnnnnnnnnnnnnnnnnnnnnnnnnnnnnnnnnnnnnnnnnnnnnnnnnnnnnnnnnnnnnnnnnnnnnnnnnnnnnnnnnnnnnnnnnnnnnnnnnnnnnnnnnnnnnnnnnnnnnnnnnnnnnnnnnnnnnnnnnnnnnnnnnnnnnnnnnnnnnnnnnnnnnnnnnnnnnnnnnnnnnnnnnnnnnnnnnnnnnnnnnnnnnnnnnnnnnnnnnnnnnnnnnnnnnnnnnnnnnnnnnnnnnnnnnnnnnnnnnnnnnnnnnnnnnnnnnnnnnnnnnnnnnnnnnnnnnnnnttgttttgtttgttttgattactaagttgtccatcagattgtcatgttttaggactattgtcagttttagagagttagagaatttattaagatttttctgccacaaaatacactcgccttaccaccgtttttccgtcacaaaacttcaagctaaaagtgagcacagcaccgtggtcatcgagctacacgaaactcctcgcttttaatcaaacggaatatgatcgggttcttaacttggattccgatgcaacccttctgcaggtgcgtaggtcaatcgtggccttttctcatttcaaactaacgtgcgtgaaggctatggacgagctgttcctgcttccacctggctcggtcgctatgccacgggcctactggttaaatccaaaggatcgagtctttacgtctggactaatgctcatccaaccgtctacggttgagttcgatcgcgtaatggatgaagtttccaaggctacttctgacgtatacgacatggagattatgaacaagttatatggagatagtgcgcttgtcgtaccacaccgcccttatactcttttgactggagagttccgctccaataatcatgaagcctatctgggtaatacagacgaactgtgggatgctgagaaaatcctcaaagatgctaaatatctacatttctctgactggccagttcctaaggtatgtcataccaacttttggtaaccttcaatctctattttggatatgctgacctcttccggtagccatgggttgcagctactcgtgatgtgatcaacaaaacgcagcctccttgtgagataaatcccgcaactagtcaacaagatgactgccgtctccgggaaatctggttagggatatacaaggacttcatggccaggcgacttgtatgtcaatcctctcctaccttcaattcaatttctgatcaagcttactgaacctgaacagtgtatatgtggcactgctcttcgaacagaatcttcatgacacgtccggttctctttcaacggcattttacgattatcacaaattttcctgtccggccatgcggtacctctgtatggcttggtgttttcaatactctcgttccaacataaccatagaagaagccccctctgcatgagcgagactcgataccatgagaacatcagcaccttaactctgcatatgtggttttgctggtcagaacaaacgtctggtcatttcgactccgatcctgacaatgctacagacgggcacttggcaggctttttacatttcaatgcgcagcgcacttgttcaaagcagttcacaggcaacctgaacggaagcggagaatttcagggccgcacttggcctcgatttggataacatgtatgtaacaataagcaattgactgcaaatacctggcaatctggttttgttgtgttgatgtatctttggggcctcgatgtaagcatttatggaccagctcagtaggtacagtctcacacgtaagttatgcaagcagtaagagaagaaggagtgattctctataactaaatattaaactaaatagcgattaacaagcctgacaaactagtcatcaaggcagttgatctgtcccagcaagaattatacacatcgacaaattcacaagacaatattccctctaagaggtgtagctgcagccattggggttcgaggtctccacgatactagcggcaattcccacacagtcggagtttccagcagggttggcaatgccagcagaagcccaaatgctccaggcaccgtcaatgctgttggggcaggcaatcagatcttctcctgcgaattggaggtaaccatcctcgagggtccaaccctcgcgcacggagtttgtggggctggactgagcaccagtggtgtatccaatcttgccctggcctacatgaaagtcagttatttgccaactaagtaggattgtgagagtgatagcatacccatgccggagcgatcaacgaagatctcctggggagtggcggactcatcatacaggtacagagcaccgtcgaggatgtagaaggttgcctcctgctccttgggacgagcacaactggcaccctggttaggcagaccagcgaagatgctgctcttagcagcgttgaaggcagagttttgcacatcactgccagagtgaatagccacgacaccaaaagtcgcagactggttggacggggcggccgagacaacggcgctgacggaggcagcgatggcgaggttcttgagctgcatattggcggaggggatgcgaagattgagttgagaagatataagaatggttgaattgggaggattgatagttgatgtttctaggatatgctgaaatgcctccccttttatacttggagcgactccgtaccgtcgccaaggttgatgtctcacccattgagactatcctccaggccaagcatgatcctacagactataacgttgatattccacaatgtgacatcaacgtgacttttttatggggcaatcttgtcgatctctctcgtggttttgacagtcaagacaatgtcttatccctgagtattgtgttgacaggatacttcgtataagccatggatatcccagacccagcgtcattagagataagaagcatttcataaatcattgcgtatttgacgcatacctctttttggcctccaatatagctctgaatatgattctgaatatgaacaaactgtcaacccctaaatgacttacttagtattgcttcctccacaattcttccatgtttctccgaattatatccacatgggcatgatgtacgggcgatccgtcatgatctccgaatcaaggccaatcaaggtctaatgtcctttctggaccggtgaaacatgctctacaataataagctggactacggagtatggagtcttattcaaaccgcctggtttttgggcatttcattaatatgggtctctcaacgagtatctataaatagcggagtggctcaccgtccttatgtaggtcctcattcgctggcttccactttaggggcgatcttagactattcgtcaatcttgaagagaatctcatggcttagcatgagtattaaatgagaagagcactgtaataaatatacatatttcgcttgttgcttcacgattcctcgctgaatcatgaagatgcaccggctagaaaagcattttcatatctcgaaccaaaaccaaaaatgaggggatttttgtacaagcaccttgatcaggctcataattccatgttgagatatgctaataacgggaaaacaattgtccttactcgggagcaccgcacgaaaagacgccacgaacttctcctttggcgtacttgattatctagatgagtgagttagtaataaaatccgtgccccaaggcagaccgccagagaaaaacttacgatatcatcaatgctggaatatgttcctccagcaagtaccaccataccgatcaggaaaatcagcgcattgatgactgccagtatcaagttcttgggctctttccaactccctttccgaaggagcatgaaccacatcatggcagggaagtagaaggtgaatccggagataaaaagagcagaagaaattgaaagcaagtcgttgaaaaaaggtatcacctcggcaatgatgaatgccacaactgtggcggccgtgatcaccgccagccatgtcagccagcccatcttagtgttgatgaagcgaatgggggagttggcgaagatgcgaccatgcaccacacgcccaaataccacggtgttgatcgaaccgctaatgaagatcacagggagagcaatgccatacgcaatgcggctgagggtagttccggcagaggtaagtgcagggctggacacatcctggccaacaaaggcgtagattgtagcaccagtgatggtgtagatgacgatctcagtgatacccagcgtccagatcgacttaataaagtctcgaggagtgtgcatttcgtccataaaggagaattggcacatggcaaaactgtaggcgaaaattatgttcgtcacagcgatgaaggcttcagtaaaggagatgttatccttcggccacgcagaccatgctactccggagagtccaccgggcgagttcgtcgcctgcacacccgtcccgataattgtgattccaatggcagcgatgatggatacgaaatcaacatagcctagaattgccacctcggtgaaactaggcggaatggcgagtaggagcaggatgacggcagaaaccacggcaaagatgatcgagcaaatgccgcttttggtgatgtcgaggaatgcgatggttcccgtcagacagtgcgaggccgtgagaaagataagttgaagaccgagcatcgcattgactagctcatatgcaaagcgaccacaccctagccgatggcccagcaatcgacccgcatcagcatagttggcaacctcggggaaggccaatttgaccattccgacaatgtaactggtatagatggcgatgagaccgatgcccacacagcagatcacaccggcgaccatgccgagtgttgcaaaggtggagggaaccgacaaactaccgagtgcaatcgcctcgacgatgaggacgacagtgagtcgcttccaaccgagacgattgaacttgttgataccgtggtcatacaggttcctctcagcctcgctcatttccccgaccatgtccccctcaaacggcggtgggggagcatatgcggccttctcgccttccgtttccatcaccttgtcggtgtcatggtcgttagagatgttttcgaagcccatgatgctggtggaggtgagactagtctgccaggcagaacggaagagaggaaaccgggtatataagaagacaaattccgcgcactgtcgaatgcggcactaccaggaggcaaagcaggattgccttgacaaacgagattttgtgaactctgcttggctgctccagcacgtggagtacgacgctgatccactccagctgatcggccacccaacgagcacaccggaaacagggattggatccattacgaatggagtgaaagtggattgcattgaaattttaggcgaaacgcagcccggcagccccagtttagtgtccgttgtgcgatcagaaggttcggaaggttaggtaaaagaaatgcaacattggtgtaatcgttgggagggccacttgagagccacttgagagttaccgagggctctaacacactatggagtctctccccgcgttactccgtactgattgcggggagagaaatcagagacaaattcacagaagaaacccatcgaaaataagaatataaagatgtcgatggtctttctttaatcgcgccacagaagatcccgaaagccgacttgccaatgaaagactcggaagttgagtggccccggggtcgcctcccccaggcggggccgataagagttttgaaggtcacatgacggctgcaaacagagcaaataatttgatatcacatctacctcctgcgtacggagcacttgtcctacattatcctacttacatcctccttgcagacgatacgatgtacaaggctcagacgactaagagccaccaacgccatgcggtttagcggtcgtggagaatatcgcaaatattgacttgaacgggtctcccccagagacggctgtcatagacatcattgcgagaagtctcccagtctccaactcatccgtgggatccgactccattctaccctaacttttgtctacctcatgaccattgcttatctccattctaacatttccagacctgctggagtacacggaagctgcgagtcatgtttcccatgatgcatcttgaaacccaaaataccacacaacctcgtacgcaattattggggaatccagacatgcattgaacatccctgtcctcccgaccgcggcgatctttgcttacaacatagttgccttattcccagcagccgtgaccgccgggcactccgggtcttggcccccgaccgtggtatttgagcaatgtgctgtccaagtggaagtcgtcagacttccctatgcaggaaagaatgaagcgaacaggaagcaagccagcaggcaagcaatggtcaaacgatgtaaattcacatcatgcagatcgtgtttagaaggggtgttggtctatattgaaccttggcggatagtcgaaatacatcacttccttatgttccagttctgctatagtgaaatagaatgtccagcttacactatctcaatatgttttatcctaccgcaggatatgcgaggtatctagtagcgtaaacatggaggtctaaaagacttctcgcagtttcttcaactctccaaacggagaatgccggtaatctaggtctagggacgcactcctgggatttcgagttctatatttctcttttcttcttcgccttggaaatattgaggcagaaatgaattgaatttctcacacatacaaccgaaaattccaagatcaggacaactcaattaattgatagccactttcatttatagaatttcttcatcggcatagggctgaagtggcaaccatatccgtcagtgggttgaccgatttgtatgaagaacagattgacactaatcaagaaggatgccatgacagacttttataaccctccgagtcaatcttcataaatcccgttctgctcaaaactagactagtttcaggccagtcttcgtaagcagtgtctccaatggaacggttctaaaatggtttcctagcgcatccgtgaactgccggaagtcatcaccagtaggcaatgagtgtaaaaattccacgacgctgatgtgatggttcatttgagcccattcagcagcagtccaaccagaaggatccttggtaaagggtaaagcaccagtgaggttgaatgtacaccagagaaagcagaagcaaggccttcaatatggtcgaaagaagcaagtttccgaagaaggatctggtcagcattgcttggtccattctggaaggcgtctgaggttgccaaaggaaatgcgggttgtttgaggggtcgcgaggtttaaataatcaaaaagataccccatccatcggaacctcgtgggtgtaaccagaaagcataaaactgagcttcttatttagtatgatggatagggaatgtaaaagtggaatattgtaatcctcagagcataatcagatgatgaagctttcaggccgaagaaaatgtaccatcggagtgttactataagagtccagaatctcgaaaagatgaatacctcaccgttcaagtttgacctagcttgacattgcagattataccactgggatgggtgtgagaaagcattgatggcaaagtaaagacgccgcacttcgatacccaaccaagcgccggtcgggaaatacaaacatccggccacgtgatccaactggaggttgtacaagggcaaaactagatagatgattttacgattggactattaagtggataacctatggctatactgtccaaggcaagcagttctttatatatatcctgattctttggaatgccgacaggaatcatacttgacgtgatatcgggttccaggccgagttgcttaccggaggaaccagtatatatatctcggaagtaggccgagtcacttacagattcaatcgcaatcagaccaacaaattagtaatattgaaaactagtcgatcgggtggaggagccgagagtggactcatttagcttgttgaactgtgtacaagattggcttcgtcggttctgacatccgacattggcagttcgcacgtcaaaatagcggcaaatagcttaaatctcaatcggagatatggccgattgcccctcactttgagccgagagaggaatatctaatcggatatggatatcttataagagctataccaggactactggaagtactggattagtacatacttcgatatatatattggacaactttgagaacttcgacatcctctacaacctctacaacctctacaacctctacgatgggttctcacgctaccgtttctcctcaaccccatgtccctttatccggagtctggtgtcctgcggtcactctttttcaccgtgacaccgactcattagacctcgactctcaatccaagttttttgcctatctatccaaaaccgggctagcgggtctagtgatcctagggaccaactcagaagccttcctcctcacccgtgaagagcgagctcagctcatctcaactgcaagagccgccgttggccctgattttcccctgatggccggtgtcggtgcgcactcgactaagcagaccctcgagctcgcaaaggacgccgccgctgctggcgccaactaccttctcattcttcctcccgcatactttggaaaagctacaaacatgaacgtggtgaagcgcttcttttccgaagtagcagccaagtcacctctgccagtggtggtatacaatttcccgggggtgtgcaacggggtggatatggactctgagaccattgctgcgatcgcacgggacccgacgtctgcgcatgctagtggacggtccaatgtggttggggtcaaactgacctgtggatccgtgggaaagatcacccggctagctgcagcgtttgcgcccgaggactttgtgacctttggtggacagtcggatttcctgatcggcgggctagctgcaggaagtgcgggatgtattgctgccttcgcgaacgtttttcccaaagtgacggctcggatctatacgttgtatcagaaaggtcagattgaggaggcggtggagctccaaaagaaggcggcgatcgcagaaggtgccatcaagggtggtattgcgtcaacgaagtatgcggtagcgtgctactccgcccagttggcagggattcaggatgcagtagctaacctggcccctcgacacccttacgaggaggcgggagaggacgtcaaaaccgggatccgacaggtgatggctgaagttgctgagatcgagaagagcctgtaaggagttagacgtgtaccaatgaagatggatttagaccatgatttatttgctgtccaggtaattaatgttgagagatgtgagatgtgagatgttgagatagggggtggatattgagggtagttgcccgacagttcaggccattcatatggttatgtatctcccttttcgagtactagtggccaataatagctgtgctcgtatcggtctgcatctaaaccagacacctcatgaactaataaccccggtcctctggcccctgtactttcaaagatctagagaatcaagtccaaatcatagagtctacggagttgtgctaaatacggacgcttggcagaatggtatatttgcataaaaccgacgtgatagccctacatgcataagtatgaaggcaaataccaaatgaacctcggcttaaacgaccaaaaactcttccaatcacccaaacatcggctcagccgagcagtcgattactgatcgggccgggactaagtggagattgtcgggatattgaagatattgaagccaatcaacgggattgttctatcttttcttctttgtttaataaagatgcagcttattattccatatgaccacccccccactacagctgaaatgagcaatccctccgatatgaatggagtactacatggattacatatagtagacgggtctcgaaaaagcccgtttaccatattgtcaccattctacctcatatcacgtcctacgcagatcgcagatctcgctctagaggtaatctcttgagtctcaacaatggagctctccgagaatgctaactccctacacttgccaacctccatcccattctggcgacttgttctcagccccggtgctatcacgcaagaggttgccgaccacccttgtgccggctcagggaccgaagacgatccctatgtcgtggaatggatgcccaaggactttcgaaaccctcttcagttaaagacttccatgaaatggtttatcaccgtggtcgccgccatcgagaccttggtcgttgctctggtctcgtccgcttatactggtggtattattcaaatcgaagagcgattcggcgcaaccaccgaggttgctaccttgggagtatccctctacgtactgggctttgccttgggtcctctgatctgggccccgatgagtgaaatcttcggtcgccagcttgtcttcatcacaacctactgcggtttgaccgtcttttgtgccgcgtgtacgggcgcgcagaatatccagaccctgctggtcttccgattcttctccggtgctttcggctcctctccccttaccaactcgggcggtgttatcgccgacatgttcatggctcgcgaccgaggactggccttatcggcctttgccttagcaccattcctaggacccgttattgggcccatcgccggtggcttcctcggtatgtctaatggaggctggaggtgggtgatgggtctcttggccatcctctgtggcgtcatgtggttcttaggagccgcgttgaagcctgagacatatgcccccgttcttctccgccagcgtgcaatgactctctccaagcttaccggtcaggtgtactacagcaaattagatatcgatcaaggacgtctcacgctgaaagccgctttgaaaatttctctttcccgacccatgattcttctttttcaagaacctattgtcttgctgctgtcgatctaccttgctatcatctacggaaccctctatatgcttttcggcgccttcccgattgtgtatcagcttcatcgtgggtggaatcaaggcgtcggcgccttatcttttatcggtgtcatgattggtatgctcgctgccgttgcgtattcaattcctgaaaataagcgctacgcgaaacttctggagaagaatggtggctatgtgcccccagaagcccgccttccgccgtgtatgctggcctctattgccctccctttaggactcttctggttcgcatggactaactctccatccgtccactggcttgcaagcgtcgctgctggagttccgttcgggttcggaatgttgcttgtcttccttagtgtcttcaactacctgatcgatgcttacaccatctttgcggcatctgtcctggcagctaacacgctactgcggtcattattcggatttgcattcccactcttcaccaagtacatgtacgaagacctggggatccattgggcatcctgtgttccggctttcctggctcttgcctgcgtgcctttccctttcctactctataaatatggactgtccatccgaaagcactgcaagtactctgcgcagtctgaggcctttgttcaaaatcttgttcaggcaatccaaaaagcccaggagcctgccaatattgaacctgagatgtgcgaaaccacattggcaaatgaggaagccgaatcgctctctcacgacaaggagagccccacggatgtccactcaattcatcacactctttcacgaacttctaccaatgccacgcatgccatgcatcgggtgcccacatacgaagctaacccttacgacattgaccgcgttcatacacgagagtcgttcaaataatccaagccatccgtcatagaaggggaacatgggcgttttaaaggatctccgaggataccaaaagagaaaaggtccaggattttggacttcacgttttgtaatgttgcattgctccgtcttttttcttttttcttttttcttttttctcttattgtgttccatataccatagatcgcgttgactgctaattataattgcacttcaaggttttgtaatcttgcgttatcctgcttatacatacgaagatctgtgtagggtttatgcaccctacgttgtagagactgggccatatgcgagggcgagtcacgaatttacagcgaaatgtaaccagtccaactcattctcgtatacggagtaataatcgataaattagttctatcgtagatgcaaaacaaaacattcactttttacagtccatatacatgccaaaagaggaatttcaataccatgacggctgcgaacatggggaatacaaagcataagatcaaaccagcaagatcccaaaaaagcagaccgaaaataccaccgcaagcccaaagacgcatatttacaactcgctatgtataaaaatctcttaacggcgagaaacacagcacaagataccagacttgcccaggaaccagagggatccaataaagcggaaaatcgacagaccggcggtcgtccacagaatagcggcgaaatacttggaggtacgaagggtagaagtgttctttgaatgttagtttatgccacagcctggagttagacaagatacataccgtgagacagagacgggtgatgccttcactggtgatacacagtgcaaggatcaggttgctgaaaatccaaatcaacaccaggttggttcggaaagccttatagccatcatccatgcttggttcgtcattatcttcaggctcaacatatggctctagtgctctcttgaccgtcgattcgaactgactgtcgatatcggcctgtggcttatcgacttcttcaatgaagtttgacttggcgtcgtctttcttcgtctcagcgacggggagcgaatcgcccttgtcagaacccttggtaccccaggaaacgtcatgccagttgcagaaagcgtagaccatcaggatattgatcgaacatgtcataccggcaaagtacgcccaggaggacgtgaacatatgccagggatccatgtacaagaaacttgcgatgaagtaaataccataagtcgaaaccaaagcgatcaggacgataccggccccggacgaaccgaagaaagactttaggaagtgggaaacacctcggtccatagagaaatcaagcgtgcctccagtgaaagcattcttgacaaggtagaatgataggaccatgatgtaagtttgaacgatactgaaatacatgaacgaaagcgtgtatgcgagacgtgaactgtttcaaatgtcagtttgacatgatggggtgatttttttcagattttagcttaccctttcggtcgatttcctagcgctaggatgaactggagcatcaagaagaagatgtatccgtacttgaggaagttgttcacgattggcgtcgcttcgttaccgaacggccatcccctattcttgttggactcactaggagttccgacaagatccatgatgacagtagtagtcagccagaacgaggctagtacgagttagtatgagattcaccaaagaacacgagatccgagacataccgagagagaaccaggtcatgacaagacccatgaagttgtatgtcatttggatatgtaggaagaacagccgtaggaggttgtggccactcttataaatccttccaaaatgcatcattgcgtacaaactggcggcgaacgaaccgttcaaccaacgacgtcgctgactgataaactcggctgcaccctccggcacatcagtctcgccctttgacgccttcacgtaggttagatgccatttaaatccagcctttgccacaagctcgaaacataagatacggtcctcggcgaggaacatattctttttaaagatattcatgccctcaatacccttcttacccaactgctttgagagtgtatgatcgccgtggaagtactgctctagcgggcgacccataatagcgcgatagcggtacgcggagaaggcacccggtaacacactaacgtacccgaaggcactctctagcggtttgtcaagaatattggagatcttgtactcgaagttttgtgcggcgacgagggggttcatcaagtttttccaaccttgtcctaacattgcgtgaatctcaccgcaagatccacctaggttcttgtcattgtagaaagactcccacaatgcaaggagtgatttctttcccggtttagttccggcatcaatgagaatcacgacttcggggttaaggattcggctgaaaccgttaaagagccagcggtgggagttaatctttttactgttcttctgcttcagacagaaaatcatttgaacgggaggaaggtttgatgactcgttgccctggggccggatcaactgttggcttggtgtaactgagagttgggtggtatattcgaacttgatcttgttagtggattttcgtcggccacaaagacaccgggaaagagggtagactttgccaaggtgaatcaagactataagaactcacgatgtgtgcgacggtttcccgaccatcgacggagcgcttcatgatgccatcttggtagataccaacagtggccaataagtcgagtgtatttttgtcgcaaggatcaataccatcaaaaaccaaggagcacacaatcttttgccaggccgggccacccttattccagaattccgacttcttcaaattgacgatatctcgaatgttctgcatgacaccgtggagcgtccgcgcggtcagaactttatcttcgttgtaatatgtgatagcgatcaaaagctcagtgtgtcggttgtacatagccggtcgcagattgtatccgtttcgtagggtgaactcgtcaggatcacaggtggccgcggtatctgtgtgcgatcagctcgagtcgcatgatcaatatttgacacgaagacttacaacgcagatgcgtgaattcttccgggaagccctcctccgattcccgatactccttctgtatcgcattctggatggcgcttggaactggatagtcgacactgagcacagagccctggaccaacttgatctttcgcgtagcataacgccgcagccctgacacaggtgcctgtcggttttgccaagcttccgacggagtctcagacatgggtgattgaatacccgaacgacggctgttgagtcctcctgcggactcctggtatggaccatcggggaagatggtgactccggggtcctgtagtgtgtagcgacggagggaatcggtcgaggcatatgggtcatcgaatgaagcgttgaaagggctaggctggtttcggtaaagcaaagactgctggctgtcgaggttctcgggtttctcctcgtaaccgtacgcttgctgtggaacaaactgaattagcatccactgctgtcttggtcggtctcctctgtttgtttgttttttttttttgttccgagtcgctggtcactcacctctcgtggaccatacacgctagtctcgctggcttggggagaatgagataggtcgcctgagtgaggcgagtgaggcgatgtgctcctctgaggaaaagacattatgtgtggctcgcgttccctggatttggtggaaaggaaatacagatatggttggcggggtgatattttaaggatttaaagaaaatatgagagaagactgaactgaattccaggtacaatccggcgcctcaatagcaacagcgcaacagcgcagcaatgacctcgtaggagaagttgaaagcaaggcaggcgacctgtccagagatcgaacctgtatgagaaacaatatgggacctaggtggaaaatagcggagggttgaggttcaaagacgtgtgcgaggagaagggctccagatgccatctatccaggagatatttttggtgcagaatttgattggaggtgccaacgatgtgggctgtgaaagggcgactgaggtggaaccccagcacatcagcaattgtcgttcgccatccaccctttctgaggatccaccatggagccgtccgagacaggacatacataatgtattgggcattgccaaccgcttttcccctgccgatgcataaccattacctgcaagtaccatggtaccccaaccaccggatgattcttccccttgatcataattctctcggtatccaaggtatacttctgtacgggtatgggatttgactctctcccgagccttgttatgacaaacataactcgtcgaacatgtaacaggctgcgggtcaacgatgccatgcgtcatgacattggtcaacaggtgtctcctatgacccatcacaggccccctcaattaatatttgctgtacctatcccttctaccatccgaaacacccctgagcgatcttgcaccaatgtacggagtactcatgctcgtaagcacattggcaaggcgtctctgccaagcaatcacagcgtgacgggctgggggtggcgactcccggagatgacgacgaggcgtcatggaacgatcggctgtcttctagggggctgaattctgaatctgcaactggcttacgagggtccacatatgcagccatcgttataaatatggtatgtggggagtgaaaaatagagaaagaaaaaaagaaaaaagaaaaaaaaaagaaagccgctaccacagcaacagagagagagacatgttgggatgccgtgtgaataatgtgtgtcatgtgcccggtcacgtgctccaccatatacgcgtacacaacttattatgttcccttgcatatgcgtacactgtacaagatacatatacaaagtacactaacacgtacgacacatccgtggacccttggaagaggaatatagctgccttggtgactatcatctatttttaggtcttagaatctgaaaagttgaagtggtcaaattctctattaatacatattttcccactttgaagccataaatattgtatcaatagtttcatttttgcttggaattgatgtacttatttctcttgtgcgaaaacattgtgtctgttctgtttctctaacttacttggtgcatctattattatgttcggcctctccgccctcacccgacatcggacttcattgcgagcgcagcctccccgaggacttaagtgacggacttaggtgacgagtcttgtcccgagaggctgaggttgagttgttgaatcacttttaacctaaatgtacgggaagcttcatcatgtcccccgtaatatcagatgagttggcaccagatcgttcgaccttccaaggttaccgaggtcgttatttgataatgccgcgcaacatgcggggtaaacgatctatctacctaggtattactttacagagtacgttgcgcgcttctaaatcgtcattcgagtaaattttcaatttgatcaaaggctatttattacctcctgtgcttaacgatgtcgcctcagagaccatcgtttgatgccctacctttacgcaaagatggacctccagggaatgcttgggggatgtttggcgatgaagatcagatgggcatgctcaatctattgaccccggaaaacaccgccgcggctgctcgcgagattgttgacggcgtgcgtgtctcaacagattgggctctcaatagtatggcgaccccctgctttggacggtcttcgttcgagcatatcatcaagaacaaggctccccggatagtcaacgatgatatcttgactttcaacacccagagtagtagtcaatgggatggtttcagacattatggctcaaagcaaggaacttacttcaatgggtgtacccaggacgacatccaaaattccactctaaatggcatccacggtaattccctctgatttccaaacttcggggtttctactaaacctcccttagtctgggccgataacggcggtattgttggacggggtgttctgttagactatgcgggctgggcggcagcgaacgggaaagaagtgaattgctttgaaacccagtcaatcccggcctctgtactccaggaggtagctgctagtcagaatactacattccggccaggagatatcttatttattcgcacgggctggacccgagcgtacgaacagctgtccaaggcggaatgccagaaactggccgactatgcagcacctccagtgattggggtagaatcgtccgaggccaccctgcgctggatttgggatcttggattagccgccgtggcgggagatatgccgagctttgaagcatatccatgccagaatcaggttttctctctccatgaatggttgctagcgggatggggtgtcccgattggcgaattattcgatctcgagcagcttagcaaggagtgccgcaagagagaccgttggacctttttctttagtagcgtgccattgaaggtgtgtatagataaattctacttctgttcccaactgaccacattcatcaggttcctggtggggttgcaagccccccgaatggcgttgctatattttgaccataggttctttcgtcttttttgatcatacatatcatgcggagtacagtctaactctttgggatagcgcggaatgcaagtgggggtctttacaagttgtacggaaatatagtgaaaaatatcagaatgcaccagtcatttccagcccagacacataggtataattagacgaaacaagtcatacaggcgattgattcccttctatcgtaccatttcaccgtggggaagtcgggccggagagataagtgaaaaagcggagaatccggggctttccgtgccggtctgggttgtgtgtcattctacaacgtttcgccagtctatgttgtatgcagatctagcagatctaaacacttccaagacctagcttaaaaagaaaagagggaaatggtccttggaaatgcaggcatctcgcgccaggcagaagatcgctcaaaaaggtcgatggtagcctgtaaccgctgccgttctagaaaaactcgctgtgccggcaatccaccccacccttgtgcagcatgcgtggatgcggacaagcgttgcgtatactcagaggccgagaagcgaatcactataacggaaaggtgaagtcggtctaagatcgtcgaaaagagttaatgttgactctctttacagctactatcgccaactacaatcgcaacctcctgcatcgcgaggtaggtttcatacctacccaggtggtcatctggacgcaatctaaccacccaggatagaaggtagtcacccaacgccgtcaagtgaaccatcgatatccaaccgttactctgaggggccatcagaacgcgacgactggtggtacaaagggacggacaatttgttcttgaagcggtcgggtgaacatcgtacgcgttgagctggaagataatttatttctattatcttgctaatcttttctcagatttcgtgggtgcctcgtctactacacatctcgccaaacggctcaatcctggctccacaaaccttgcatgggatgtgcgtccactttacgatgacccttcatcattgagaagaccagtcgggggctcattgcctcaattaccacctttcgagtttgccaagcgactgttctgggtacaatacgcttacatcggtaccatcttctcccttatcaaacccttggagtttgaagaacggctggatctagtctatcacaaaccacttgacttttcacatcgtgaatcttgcctagtatactgtcaaacactgttggttatttcctttggcttgatgtatagtgtgaaccagtggattggcgaggaaggtcctcccggcttcaaatatttcaagcatgcattacgtttcttgccagatatccacgaagagggctcaattctcttcgttgaggtactatgctatgtggcatactatatgcagaatctgaataggcgggatgctgccttcctctacgtatgtattccttccattagctttccgctgtaccgctaacgacgtcagattggactttctctgcgtatggctatctccttgggtctacaccaagaggtgtctgatctttcaataagtgaatcagatcgcaaccgtcgacgtcgggcttggtggtctgtctacagcttggaccggtaatttgaccaattcccttacatttctgagaacaatacttacacggatagaattctctcggtcaagtctggtaaccccattacaattcacgatgaagacattggaataacttggcctacagctgtggtatgttgccttccatggtatgcctaggtattcgctgatttggtttttttcgatcaagggtggatcaaccgatccatggccatcgaccgttcttattcattatacacaactatcccgtatattgggacggattggggaaggtagaaattcttcttgctttttgtcgcattgccaagctgacctagatggccacatcagaaatctacagaaagaagcctgtatccggatctaacctcgttgcttctgttcagagtatcacaaatgacctctctggctggctgcgacaagtgccagatcgactccgcatcgatttcaacacactcaatacccatatcaaccgagagtctgtctcgatcaacttgcacttctactcatgtgtgaacatgactgcgcgcccgttggtcttttatgtcatccaacggcgactcgacgcggaagcctttggatccacaacagaagactggaaagaaggactggctcccaataccgttgccgtcattgacagctgtatcacggcagcgcgagcaaccactctgatcatggatgcagctgcaaaacataatctcattggtaagcgatcgcaatacaaccccatctcttctgtcatgaaaccatctgattgacgaacattctagctacatatggataccttgatggcgactatatcttctctgctgcactgctgctggttatggtgaatgctgcgtttccgcccaatgaagtaagtgcccgggcaatggagaccgcactgaaccttcttcgcggtatggcagatcggggaaatacatatttggattcgcgtcactcattgctgttggaattacgggcggccattggacctagacctgctgaagagaaggatactgatgtggcaagttctcttgctgcaggtcaaatgggccctgtgacgccaatgaccgagaatggcgtaaatccatatgttctagatccgggtgcggagttagcagcttcagaagagcttacttataactggccagagctgccagatctcccttcttttcgggatatcgccttccagttagatctaaacgatgatccagcactctgggaaggggcattggatcaaatcgacattgacatggacactgactggattgagaatactctaaagcgatgagaatgaatatatatcactcacctcttatcttatgtgctagttcttagttctgatgtagcttatacaccacatcttatcacgatctgcatccgccatgcgactccgattgttgacatatgcttgcttactttctatttgctatttgctatctgcttctttccttgttcataagtggtttgctagctaagtcagagatcgatatttgtatgtcccacttctgcatttactttctcttttttcttcatcttaattattttgaaaggtgcactcctcagacctggcacgtcacatgtgggataaattgatgcctgaggcccatgcaacttatatgaatatctccacaacttcctaactattattattatcattatgtagactacacatgtgcccgctatctgcccctccatccccaatctcaccccgcggcttatcaagctgtggaggtatcggcccgaggaagccgaaataggagtcatcggcccgacacgtgacattcatctatcatttagaggtgtgttgggatatcggcacaagctctgtgagataaatgaatatggttctctcctgaccttctttgtctgttgttatattctttccttttttagaacccactcacatcttcccaactactagtcgcaatgtctgactcagggaagatcaccatctccatcgatcgtggcggcacatttactgatgtccacgcgattcaacctggccgtcccgacattatcttgaagcttctctctgtcgatccttctcattaccaagatgccccgactgagggtatccgtcggattctagagcttgccaccggggaaccacacccccgaggccaaccattgagactcgaccgtattggttgcctccgcatgggcacaaccgttgcaaccaatgccttactcgagcgcaagggtgcccgctcagcactcttcacgacgaaagggtttcgagatttactgaaaattggcgaccaatctcgcccggccatttttgacctatcaatggctcggcccggagtactcccggagagtgtcgtcgaagtcaacgaacgtgtgctgtcgtgccatccttctgctgatagcgcttgcttctccgattgccgcttagtagaaggaatcaccggcgagaatttccgcgtggtgcaagaactagacctcgttcaggtgaaggcagagctccaacgactaaaggagcaaggaattctgtcaatctctgtggcgctactgcattcttacgcatatcctgagcacgagcgtcaaatcggcgagctcgctcaagagatgggattctcggtcactctctcttcaaaccttcaacccatgatcaagatcgtgcctcgtggcatgtcggccgctgctgatgcctatcttacacctgttatcaagacatatattgactctatctcttccagttttgaaggtgggttggagagtcaacagaaatgccgatttgagttcatgcagtcagatggtggactggttgatttccgcaaattcagcgggctgaaagcgattttgtccggccccgcagctggtgtggttggctttgcagccactagctgggatcccaccgagaagactcccgtcattggtttcgatatgggtggtactagcacagatgtctccagattcgatggccactttgagcatgtatttgcctctaaggttgcaggtgtgataatccagtcccctcaacttgatattaacactgttgctgctggcggcggctccatcctcacttggcgtaatggcttgttttatgtcgggcctgagtcagcaagtgctcatcctggtccggcatgctaccgtaagggtggccctcttacagtgacagacgccaatctgttcctaggtcgccttctgcccgagcacttcccgaagatcttcgggccgaatgagaatgaagctctagatacagagacgactgcacgccttttcaatgaactcacacagaaagtcaacattgaacgccggcagcaaggccagtcggaattttccccagaggagattgcacttggtttccttcatgtggccgatgaatctatgtcccggccaatccgtaacctcacggaggctcgtggctttgagacagcatctcatcatttggcatgcttcggaggtgctggtggccagcacgcatgctcagtggccaaaacgctcggaatatcccgcatcatcattcataagtattcttccgttctatcagcatacggccttgctctggcagaagttgtcaaggagtctcaggaacctgtttcgtcagcctacctatcttcacaatctacacttcttcaacgcctcgataacttgtcagcatcagcaaccaaagatatggaatctcaaggtttcccctccactcaagtgcgccatgagcagtacttgaacatgcgctacgaaggttctgataccagtctaatgatccggaagcccgagaactcagacttcctggaagcattccgcattcgtcatcgccgggaattcaacttcaactctgaccgacctgtccttgttgatgacgttcgagtacgaacaatcgcctcttccaaggtgcggactgagcaaagtcccttggttcaactgaaagaagccgatctgcgagatgtcgcgccggctttaaataccacttcagcctactttggccagttgggtcgggtggatacaccagtttaccttctcggtgcattggagaagaattcccgcattcatggcccggctatcattattgatcaaacccaaacaattgtcgtggctcccaacgcagtggcgaacctgctcgatacctgcattgtcatcgatctcaatgacgaaccaacctcatctggaagcgccctgtcatcggaaattgaccccatcaggcttaccatctttggacatcggttcatgtctatcgctgagcagatgggtcatacgctacagaaaacctccgtttcaactaacatcaaggagcggctagatttctcttgtgctctattctcccccgacggaggtttggttgccaatgcaccccatgttccggttcatcttggatctatgcaatttgccgtgcgttatcagcatgagaagtggctaggcaacctgaaggatggtgatgttctggtggccaatcaccccagttgtggaggcacccatctgcccgatatcacagtaagtcaccttcatattgactacatcgaatactaatatatctataggtcattacaccggtctttgaccgacctggtggctccgagatcatgttttacgtggcttcccgtggacatcacgctgacattggtggtatattacctggatcaatgcctcccaaatccaccgaactgtggcaagaaggcgccgccatcgaaggtgataagattgtcagtgatggtatcttagatgaggcacggttgatcgagttgctggtcacaaagccctcgaaatatcccggctgcgttggagcacgctgcattagcgacaacttgtctgatctgaaggcacagattgccgccaacactcgtggaatcagcttgattcaaactctgtttaacgaatatggaactcagaccgtgcaaaagtacatgtacgccatccaggcaaccgccgaggctgcggtgcgcaatcttctcaaggaactatatcagaagttcaatggccagccattggagtcagtcgactacatggatgacggtacccccatccgattgaaggtcaccatcaacggtgccgagggatcagccatcttcgacttcgagggtacaggccctgaggtttatggtagctggaacgctcctattgccattactcactcggctattatctactgtttacggtgtatgatcaatgcagacgtgccactgaaccagggatgcttggcgccaattgacattcgtgttccatcgtccagcattttgtcaccgagcaagactgctgccgttgttggtggcaacgttgtgacctcacagcgcattactgacgtcgtgttcaaagccttccaggcttgtgccgcgtctcaaggctgctgtaacaacctgaccttcggtagagacgccaagctcgattcgtccaccggtgctgtcatcacacctggatttggatattacgagactatcgcgggtggcagtggtgctggcccaacttggaggggtgagtctggtatacaagttcatatgaccaacacgcggatcaccgatcctgaaatcctggaaaagcgctatccgacgatgctccgtcagttcgctctacgtgagggctctggcggccagggtaggaaccccggtggcgagggagtgattcgcgacatcgagttcctttcaccaatccaatgttcgattctgtctgagcgccgtgtccatcggccttacggactggaaggtggccaggatgcacagaccgggttcaatctgtggatcacgcgggatccagatactggcaatgagcgccgtattaacattggcggcaagaacaccgtctcaatgaagacacacgaccgggttgtgatcaacactccgggtggtggtggctggggggctgtatgaataagttgtatagcgagcatgatatttctagtataccaatctcaattaaatacagttagagatacaatggtgcttttttggcctcatgaataaaatcacaaaatttccttttcacaacttagactttccaaatactggtcgccacatttcattcattagtcggctggtgtttaccatgtctggtcgcaattggtcgagggaagagactccaagcatcttcatggtgatttcaagttcttcggcgatgactgccaatgtgttagcttggaattgatttgaataccggtcccaacttactatctgtacatctttccactccttcggcgccgtatgccgcgagggcatagtagtaaggccggcccactccaacggcggtcgctccaagacacaacgccttgagaacatctgctccgtcgcgaagacctccatcaacaaacacctggagcttgtcgaaagcctccgggtagtatgtgcgaatctccaggagcgtcatcaatgagcttggggcggaatgaatctgcctgcctccatggttgctcaacagaattccctgcacaccatattggacggccagcttcacgtcctctacactttgaacccccttaagaaccagtggcccaccccactctgacgaaatccagtccaaatcttcccaagtaagaccaccatcgaccgagccgggaacctggcgacccccaaatgctggcgcaaattcgttctcaccgtgagtgtctcgtgcattttcggtcaaaccagcgtcgatattttcttgtgcttggaggtagcgatcggcagtacgctttcccagggttgaagtgtccaccgtgacccacaagctttggtatccggctgccttgactctttgaatgagtgacttggcttttgtccgatccacaggcacatagagctggaatgacaagttcgaagggctttggttgccaagtagccgttgctcgtccagatgagcatccatgatctcctcgagcggcttcgtagatgctgtactgatcatggtgtgcagtcctttgcgggtagctcctctcaccagcaagggttcagcgccagggtgtgagctgcccagtgtacccatagctgatacgaagaagggaaactgggaggtatgtcccaagatgttccttcgggtgtccattgaatcaacacttctcaagatccgagggcgaaagttgatcagagaccagtcatccagattggttctcattgacaggcccgtattagctgagcttgatgcgtaaacccatgacttctccgacaggacattctttgcgaccttctcaaagtctgtcgtggtgacacatagagaagaatcgggaattttgttgattgccatcttttttatcgtagtagcttaggatatgaagcaaaaaaaaaaaagaaaaggagcatggaacatggaacatggaggctaataaagtatagaagatctgataacgggcccgaagtcggccccgatcggctactcattccggctcggctatgtccatttggggtaagatcaattgccgaattgttatagctcttgaatatttacggagtaaatgtagacatatacacattctcccctgagtttccggatagtcatctctttttgtctatttttctatatcggaaatgaggtcccgtatttatcgaggaacgactaccacgaaatatgtttccatatgggattatattctcaaaatggttggacaatgagcatattcatacgtcaacattctcttctgcgcatttaatgagggacatagagtcgtagccgccatttttattgatgtagatgcgaacatggccattttagaggaaattagtaactaattgaagagtcacaaaccgcagatttattgcaggatctggtcccacatcatctatccctggcttttcagatttttgcgataatgtctccagctcgtaaacataaaacaaatcgacagcacgagacccaatgacgccagtccaattcccatgtacagcgcaccgcggtaaccccgtagtacattgcgccctccatcattgacatgcgtttctaccgtgcctgcaaatcctaggccaagggagatagaatagttgaccgttgtagcaacgagggaagcggccagtccttggtggtgccgaggcatggcgttgctcaatatcagggttccagagggaaaagacatgtccctaaaggcgaatgattaatgacgctgaataggaccaaatctaatgacgcaagaataagaagacttacattccccaggaggttatcaagctcaccacaaatgcctgcgcccagtaaatttgatcgacaggtacagtggcgaagatagagaggcctgcggtgaaaaatgccattgcgcaaaacatgatgacgctgggtggcaggcgaccaagtaggaaaccagtgatcaaagctgccacggcaccagaaatagcggccgctgaccatttggccgtggccaacagtggagaatcacctttgatgacttccatgaattgatagaagtagtagatgataattccaaaactcgaccagccggctgcgatacacccaagtacccacgccagctcagtagtaaagactgaccgcgggagcaatggacatagtgccttgcgttcgattaatgtaaaggcgccgaggcaaataaaaccaactatgaggagaacataggtgtaagggttcttccagcccacgagcggggcttgattccaagcaaagttgatcagcaccaggcctgaaattcctgcagtggcaccaggtagatcaagacgttgccacaaacgaaggttgtcgtcgaatttggcttggggggtgtgggggatgacaagccatcctatcaaggccatcattgcacacgcgattcccatcacccagtatccccagggccaccaaacaagctgagcaaagatagaagagaaaacacctcccacgataaaccctccaggcgctgtagccccaaacgcactgaatatcatttccttgcgtaggcccggccgatatgttcttccaagaattgcaattgcattaggaagtaacatagcgggaccaatcccctgaagggcacggcagcaatcgaagaatatctgattcgaccagacactgaacccagccaacagtgaccagatactgaaccaacagaaaccgatcacaaacatgtttcggtgaccaaagacatcgcctagtctaccagcaacaagaatgaaagtgccaaccgttaagctgtaggcggctgcgaaccagcttaaatcggcaggatttgtggtgccgaagctatcgccgatgatatggactggagcaatggagatactaagaccagcttgagtcatgaattgtgccatacacaccacactgacgaagatggtttcttgaaaaactgatttaggcggttccatttgagactgagacgtttccagtcgggtcaaagtttcgtcaacatcattttgtgtgggcaccttgtttagattgatatcgttctcctccgagtccgacattgaccgagtgcgatgattaagctccatagcgaaagtcaaatacgcaccaaagaagaagctgaataaagatagagacaaaaataagagacacaatcgaaagaaaccaagctggctttgtatctgatccaccaaagtggaatgccgacttcaacatcttcccgtcgggcccgatccgacggaattggagatgtcactccgaatctgtcaacttctgttatgacagactcattgatcgtagggcctaatctgtgtaaactggaggctaatggtatatgcagcttcctattaataggaccaacaattagattcaagctgaaaaagcattgatctatacaggtacctacatagatgatgtagacatgtataggtgctgaaaagaagtacacaaagaactcctttagcattttgatcgaaagcattgccaaatctcaacttgaaatgtaattgaatatagtcccttgtaagctctgaatatgttaaatggtatacatctataggtggatgttatggctatacagtggatgctccaggctggatgagggggtgcttagtaagtatcacatgcatggagctgccccaggcggccctggttctttcaactttcgctttcgctttgttcgctttcttcgcttctcttttgcatcttctcattgcaagtctcaatatgtctgtcacgatacccggttgatcagccatagggcttcttctctaatatttattcccttctatctccattgctgcatctctgcaaaccacccaagaccgcgttatcgcatcttccccgcgaacaaaaaaaaaaaaaaaaccaaaagacaaaaaaaagtgacgtggagtccaaggacacggtattgacctccatgccaaaatcaccacctattgtgtttattgccaggtgaatatttactccgattgcactgcttccgctactcactagcattttagacatggtgcccgcctcgatgctgcagataaagattggcacttaacctctccaagccctttcgatccgcccctttcctacggtggatggatacagtctcgggcacttggtgtacgtataggaagtctgctaagggcccgacagttcaccggggaagatccagagagtcagcgcagccatcacccgacctcggataaacaggcaaaacccacccccgcatcttcggacctgtcccatcgatataacgtcattgtccatacctctccttaccttcggtgtctgcaaactgcaataggggttagtgctggtattcgccaagcctcggacacagaagcatccgaaacaactagttcagctcctactgcccccacggtttcatcaatccctgaccagcgatgcctgcttcgcgtcgacgcatttctgggcgagtggctatcaccggattattatgaccagatcacgcccccgccgggctcggacagaatggtggcgtctgccaaaggggaattacttcgtcgtgccgaggtcatcccagccaccgctggtttgacaagggcgttgtcgggccatttccctggcggttggcgcagccagtctcatcctacctcgccggatgatgaagaccgtcgtttgcattccgcaacatcccagcgtcagcgttccaccacccatgacactccccagaaccctacccatcacaagcatgcaaagaagtctctcagtcggctagaaacggacctgccgcctactgtagacgcatattacgtgcccccaactcctagctatgccatttccgcgtcggaccccattcctacaggctatgttgctcatgcacgaaacgcatgtacgaggatcgactaccagtgggacagtatgcgcacgccttattggggcacagggggcgagttcggcgaggaatggagtaccatgcatgaacgagtgcatgatggatttcagcacatgattaactggtaccgggaacaggatctacctgaacacggttctacagcggagtcaagcaaggtaaacgacggtaatatacaaacggtcctcgttattatcacacatggcgcggattgcaacgctttgatcagttcgttgaatgggcactcggtcttactcgatattaacacagcttcactcactatggctgtgcgacgcaaccgtgtcaataaacccgcgcatgacatggatcacacgcctaaatccccagaccctgagaaccaatcggtgtcactggaatactccttgcagcttgtggcgtcgaccgatcatctgcgcccgggaatgaacccctcacagctcacctcgctgccatctccctctgtccctgtactttcaccgcctccggtccctgcctatcggaatcgtcttggctctcgttcatcgctcctccaagaaacatcaacaaatggaccacctaatactagccctcggacatggaccctggcgatgcgcccggcaactagttcaagtacttctcaaggtgcctctgggctgtggaactcgatctcgtcgcctaaagcagatgcagaggacaaccttgtgccgaacttcggtgatcgaccggtcagtcaagattccgccctctctgataggtatgacaggtctgcggatcttggctggacgaagcagttaccacagcggacggtgtcgcagcgtggtttatgggggagtgctcagccattggatcgtgaatgcggatcgaagcggcgatggacggtggcagaacagtagctgtggaatgattgtttttattggattttaggatacctcttgcatggcgttgtggtctacttctaatttttttggcttttcgatattcaaaatattcccatgacgacaccccaaccctcaggcatctaccaggcatctaccaggcaccggtaccgtggcttcccctcacgtctgtctctccgtctctccgctctttgctctcctctctcctctcttcctttcaagtatctcctcccaactttcccataacatcgagactttcatgtcaagcatcggaacagacggtctttccgtcacttattcctctgaccgaactgggtctccggatctacgcttgatccactataatgatgtctaccacgtcgagtatgcttgtctctccatccctttctccccctagcttcataaacttcaatttgggatgatattaaattatctcgtatagatctggctctgcagagcctgtcggtggggtgtctcggttccaatcccttgtaaatcactaccgttatcacccacagttcgccgggcagcccgatatcctgaccttcttctccggcgatgctttcaacccgagtatcgaaagtacaatcacaaagggcagacatatggtaccgttcctcaacgctgtgggcaccgatgtagcgtgtgtgggtgtgagtatggcaaccagctgcccgtcaggcctacatacaccgctaatctgagcacccacctagaaccatgatctcgattttggagtcgcccaattccgccatttggccagccaatgtcactttccttggctattagcgaacgttcttgacccagcactaggggcggataccccaatagccgactgcggaaagtctcggatgttgacatccaatgggctcaagatcggtgtgttgggtcttggagaaagagaatggtatgcgctcctagaatgtatcttcggatgctttcattcctttgcttactcgggtctaccttaggctcggcacaataaactctcttccgcctgatctgatctacaaatccgcatcccaaacagctcgagtgcttgcgaaacagctccgagatgaaggagcagatctcgtcatcgctgtcacccaccaacgtgaaccgaacgactacaaactggctaacaacctgtcacctgatcttgtggacatcattctcggaggccatgatcatttttacgcccatgctgttgtcaatggaatccatgtgatgcggtcagggaccgacttcaaacagttgagttacattgaggctttccgcaaaccggacggcttgcctggttgggatttcaatattgtacggcgagatgttgttcgctcaattcccgaagatcctgatatggtggcgatggtgacccgcctaacttccagcctcagggctaaactagaaaagccaatcggatttacggtcagcccgctcgatggccggttttctactgtgcggcagcgtgaatctaatttgggaaattttgtatgtgacctgatgcgcttctactatgcggctgattgtgccatgatggcgggcgggacaattcgcggcgatcaaatctatccgccaggaatactgaagctgaaggatctactgaactgcttccctttcgaagaccccgtggtgttgttgcgcgttccaggccatgcactgctagctgcactcgagaatggggttagccagcttcctgcactcgaggggcgattctcgcaagtatccaatatcaagtacgggtttaaactggatgcaccgtcggggtcacgaattacattcgcccgtgttggcggcgagcctattgacttacaacgtgactatcttctcgccacacgcgggtatatggcccgaggaaaagacgggttcacgtcattgcttatccaatccgaaggaggtgatgtggaagagcttgtgtctgaggaaaatggcgtgctcatcagtacaatcctacggcaatatttcctaagtcttaaagtcctcggaaaatggaaccgctggagcgccagcttaggtcggcactggagtattgtgcatcgtaacctgcatggtgagggctggctgaagccagcatctcctaaaaaagagaagaaagcatgcgacctgctgaacccgcggcctgcactccggcggacagcccggtcagcatactactatggtcgatttcccgaagaagtcgaacagggcaccaacgttatcgccggggacgagacgaatggtaatgccatggactccgactcagacgaggatccagagattctcacatcctcgcgaccaaccacaaattacgtcactcaaccagcgaaatcatccgctgaagaggagtatcttctacaaattgcgcggcgagttgtccgaaaatggatgcggcacgcaggtctgcagtgcaggacgttgaatactatggacggcgaaggggaattcactccggcctggacgtcgggaatctctcctcgactagagggacgcattgtggtagagtagacatgctcctccacttccattccgtctttctcggattttctggtttctcttttgggtttccttttgttttcggggattttcttgtcttcatcatatttgctgttctctattgcatcatgcatatgcgctggatggcctggcgtttccggctggacggaatgcatcgataccctgaatgttttcgatatattctattcagtcggtcttcttcttgggaacctcctttcgtaacaagtagtctcctcccctccaagccttgtaaactccgtaaagaccacaaaatggccagacgtcccacagagcacgtttgaccgatcctttccacccactctcgaactccccccgatgtggaccagggagatcagattcatgcactcggaccttttcatacaaagacggaaggtgctgtgcatggtatttttcccgcagagaatcataaccgggcttgttatagatggaccagaactcgtcctctgtatagtaagtatgtgcatatagccatttctttcctccaagactgtggaccttatgttctagccgtcgattttgagccacaaaaccgacctcatccgtggtggcggcaggcccccagattccaaaattgaggagtcgtgtcctctgtgcatcgactcctttgtcgtcatctgccggctttccttccaaaccaccggcacttcctggtggtagcggacagagccaaagcggatattggccaaagttttcagggcggtccagccagtccaggaactcggcagcagtggatgttggtacaccgacgtcttggataatatatcgacgcgcaagcccgctgacgtgtagggcgtgatacatcaccttggtgtgcatgaatcggttgaggagccagcgtgtaagaaaggtgaatggaacacagaagtagctaaaagcataacgcgcaacccagaaaccacctctatcatagcggaaaaggtagtcagtgagaggaatgtagtccactgcatctggcatgtgaggagaattctctcggtcggagatcttggattgagcaatctgttcaacgtgcaaatagaaccaatcgtcttgtcgccgagtaaagcgccgaggctttacattagaagtctgttcaacttgtcttccagcacaaacgacgatcttgtcccttgcatagacgattccgtccagatattcagtgcttggatcagcactagcctcttcaaaggcacgcaccgcgtcctccatattggaattgacatagtatttcagttccaccagtggcagtgaatttttcaatcgaatttccaacaaggtgaccactcctaaggtcccgaaggaagatgcggcgccccagaacaagtccgagcgtcgatccgccagttccgatcccatctcgacgcggtcattgtatgccttcaccacctgaccatctgccaggaccatttcaatccaattgactgtatgatcgaagaatccctcgcggaaagaactactctccccggatgtccccgagaacccgccgccaaccgagatgttggggaattcgacaacaactaaagggaccaaatcatgggccttggtggcagccactagagcatccatagagacattgggctcgactgtagctgtacgtcgagcgacatcgatctcgaggacgcgggtgagaggttctgtgctgaccgtgttggagagagatcggttggagggccgagtactgttggtagcaccatgatatatacgaaatggttgctggcgactgtggaagtccgctacccgtgctgagatttcttgtacagcggcagtatgatccatgataaataataatcaaaaagaagacaagggaaagatgagaatggaatgagaatggaatgaggagaatgcccgaggtctccgcatttagagccggacgagtgagtgtgagatgactacatttactattcatatgtttgtacgaaatcaaattcagaactaaaatatcggtatcatcaacataaaaagaaaggaaaatagaaacaaaatagaaaaaccgagcttattggacgccgactgggcgtgctccagcgagattgaccaccctaccccctccagctgctccaactactgtaggtgctcgaggctgtacccaaccgggaacactggaatcatgactctcacgtccagagatggtctgccagacgttggggaatcctgtgggcaagatgcctttgattctggcaccaggaacggcaaatcgaggctcacgatggagaaggtagccgcccatcagcccttgtgtaatcaacgatgcgaaaatcgattcgatctcttgcatcatggatacatctgcctctgtcctgtcgtcggggtcatacgcatatggatccagttcgtactcgccataattctcttccgggtctccgtcgatcagttgacccggaggattgggctgtgatcgcccttcttcggtgtaaaatccatccggagctaaaaaatcaccatatttttctagtatctcttgatcagtggcggggctggcccttccatctgccccttctaggcgagcgtagtcgagatcagtaggttcggaaacgacttgtgatccataaaagttggaggacgccatagcatttgccgggccatttccggatgctgcgtgctgcgcttggagccatcgtgtcgccacaacgagctttttaagattgaggattggtggaggtcccttgtgcgcctgcgcctgcggacctccgtacgaacctccatacatgaaaaccttgcgtgcaaaagatcgccatacaagaatctcgcatcgatttcggagggtaaacagaattcccttatgtgcaaaccactgagcagtcggggagccaaagaagagatgttgtcggaaagccaggtaatctcctcggacaatcaatcgacacagtggctggaagtgttccgctaatccttgtgcttctggtcgtcgaaggagtgcctgagatggaaatcgtcccaagataatgttgcacggaatgaggtatgagaggattaagtgtcgttggcttatggcctggcggtggcattggtcataggcggcctgcaaagcgatgcgggcgggaaagaagaggttgttggcgaaaaggtagcgcccgagataatagaggtaggtgacacgctgtgaggctgggaagtaggccaaggggggtgattgggcgctgatgcttgcaaacatttgctcggcgttgcgtagtttgccgcactgtgttccgtcagcatcaagattcgaagggaaggtgagatattcaaggataggcctccgtacctggaagagcaatttgaggcagagattagccatgaggtagataccgatgcgcttgccctccggcttaccagtagggccgggagtgccggtgcgatcggtgaggcacttaatgaacgcttcgcgcaccacgttggccgatttttccaccaaagttaccttctcgatgctctcgtcgtgagccgccagaccctccattcgtcgaatatgcgcgatcaggtccggtcgacgatcaaggcccattgccaattttgccagcactttggacaagtagagaaccgtaggaagaacgacgacacccatttgactatctccgagtgcgagcacgcattgactgcagttaacgatacggtcgagtcagctttcaagcccaaagacatgagtagaatcctcgaccggggacagagtgcgttcagaattcttcgcgagggcagcaaaacttacttgagcagcgccttcaattggttgtatgtttccaataggttatctgtgttcatatcgcgtaggaatatcaggtagagcttgacgaaagtcgggaacgccgtccatgagctacttttggatcgcggtacgagaggctcgcatcgtcgaagaagttcggcgtcacttttggggcccgggccataattctgtcgtagttcactgatcatgcgctggtaaatgtccgagagtggcggctcgagctgaagaaagtcctggactttggcgccatcgcgtttctggaccaattcctgcaaactgccgaggaattggtcgaggacaggtgtttgactcatgttgaaagcgcgagatactcggttaactggtagagtcgcaccagaagaattaatttgattgaacgatcattgtgtcgtttggcattctcaacgttcaaagaaacccaactggcgggtcacagagtcaagaggctcgtctgttgacggcattgatggcagaacccgtgaccgccctttgtatacaagtgtccaacgaggggagttgattcaatttcaattctattcaatttcgtgaagacattgggtgctttagtggggattcaatcaatatataatttatgatagcagttctgatttggttcaaatggattggtgccacttcactcggattgtctttctaccatctatctatgctccgtataatatgcaacataggatggatatattattatttccatagaagtcatggataataggtaagattttcacctacttgaaacacagtgatatcccagaaaactagacttctttgtcagtcagtagtatagtccccatacaaagccgggcaagatacatacaccaatatcacatgggacttccttacgtggagactattatggagaatatctacttctagcatagcatagcatagcatgacatagcatagcataagttatctaagtatagtctacctccagggctcgatactccatacgtgcggccaaaccaggatccttcctatgatgtcatataacttggactaacgatcacatgtgaaggagagcataacgtcacagagctgggaatgggaagtacaaatatttcgattcttcttgtccttcccaattgatcctaatttccattcacgcaagaagtatgggttctgagtcttttctctcggcgctctcggcctttatccggcatccattcgtagagacctttacctggctctacatggttatacaagccgtgttggtttacatattttctcctatacccccgccccctgcagctttgaatccaaatcttcctcgaaagagagtcgcggtcattggtgcaggcctaaccggtgtgtcttcggctgcccactgtgttggcaatggcttcgatgttcaattgtttgaatccagacccaaagaacaaggattgggaggcatctggagtgtgagttttcttgatttctatttattcctagttaaaatacctgctaatacttttacagagagtcaattccacctctgcattacaggtccacagcgtcatgtaccgtttccatccctcggtccagttcgacagcgcatatcccacccagcaacagatcaaacagcaaatcgttgatgtttggaagagatatgatctggaaagacgtactgccttcgagactaaagtcacgtccgtgaaaaagaccgagaatggccagtggatcatcaacgatgacgaagagcagtatggccgcttcgacggcatcttggccacggtaggcgtttgtggagatcctaaaatgccaccgctacccggccaagaaaagttcaagggccaaatctaccactcctccgagttggatggcacaaatgccaaaggcaaaaaggtgctcattgtgggaggcggtgctagcgccattgaggccttggagttcgccgtcaaaaatgaggctgccgagattgatgtcctttctcggtccgataaatggattattcctcgcaacatactggtgcagtctctccttgcatgcaacatcttcggtcaggaaacatcactttcgtggattcctgaatggttgctgcgcaagtttttctatcgtgatcttcaagacattgcgccgacagacaagggaatatttaccgggactccgatggccaacgacgagttgtttaaccagatccgcgagggcaaagcccactggttacgaggtgacatcgtttctgtggaagagaacggtgtggtgttcaattatcgatctaaaggcgtcccaaagggaggacctggccatgaacaactggtcgagggagatatcatcgtcatggcaactggtttcaaacggccttcattaacctttttgcccaatgagtgtttcgatgaaccctacggaccgcctaattggtatcttcaagttttcccacccaagtacccggatatttgcgcaaacaatagtacctacgtcgatgcgattggtacagtgggcaatatgcatattggaatctacacgcgattccttctcatgttcctaaccgacccattgaccagacccactgaaatgtggatgaagacctggattgacttcacaaggttcatgaagcgtctggcgcccacgggagcatttgacttctttacctatgctgaactaatctactggtacttcttcgtccttgtcgttaacccgttccgttggaagtgggcgttgttcgtgttctttggtattggccgtggcttgcctatgaggtttgtggagcaagagaactcgttccgcagggagctgaagaaacagcccgaatcaaagaaagctgattgaattgggttgctatgatattcactcagtgtcatgatgaggatacatgtgcattgaaagctgggaaggtcatggcttgaatggaaatttggctggttggttcggcttggaagacaattgcataagacacatgtattgtatgtaaaataaaagcactaagaccgcaaagtacgcctgggccgtgtcctctccttcttcggctagcttagccagaagtctgttggtgtgttcccgcgctttgtccgacagcttgtcgatcttttcttatatattcatctgaacgtcaggatcgggtttccagttagttaggtgtgcaacttttactacataggggtatacggtaaaataggcgagaaacgcaaggacagacatagcgctcacgttcaacaatatccacctgaagatagaaaatcaactccatcattgccctttaatttctggaatcttcttctccatattgtaagcccaatttccccctcgcaaaaagcgatcggggatataacgcttctcctctagccagagtataggccatagcaaagtcacacccaggagacagaaaaggcttgcaatgagatgccaaccaaaaataatccaatacccgatatgcggcatgataaacttgacaaactccgatgtttgatatagatcttcttgcttggaaatgtagtaaagcttgtggtcgccattggtcgtagcatcgcttttgaccgaatcgtacgtcaggtccaagaccgtagtgagagtcaccggagcgacatggaagggaacaagccagatggtgaagatctgtgacatattcacatagagtttgagtttatcttcatcaaaagctaaagaattatcagagtctgaagtcaaaattatgaagtccacaaccttagaagtttcctgttgacataccaatagaatggatctctagctcgatccggggtgacatgatcttataccattgaaatatctttgaaacccaccatctgctaccttcaaagctgggcacacggcagaatggatgagtaaaggatacattgttggtaaaataccggtgaaggacggtttcttgaaaagatggcggcgactgtgttagaccccggataacggtaggtatatcagccactgaaggaattagctgatgaatccaaaatatcagatcgataacgcacctgggttctccattttggtcaaaacgttcaaaggcgttgttggaaaagaaagaaagagaagatataaagaggtagttaactagcttcgggtgatacggtgacgtcatgttcgactatccaggtcggggtttaacacgtgaatctcgtcggagtcacaccggttggaagctacgccaatcaaatgagttgcttttaattacgtgacctcttctttcgatcgatgtgacataattcatagagctcataactatcaaaaattgtatttctgccagccctagaagggtacaccagatgccggttttctatcggcatgccgagtcattatattccggcggtgagacgtagaatataaacttccacccgtggacagctgtagacagtagaccgagttgatccggtgagatcataccattcgatatatgtcgtagaagtagatacatatatgcattggtcaagatggaccttgggtaatcaagaaaactccaaagtgattgagttccagaaagaaacgcctttgcacatgggaattgccccctgcaaccattttttaccgcttccagctgtcaaccttctttcgtcgcttgtcgaaaacctggcccatgccgacaccatcaccgcgttgcccgtcctcgttgcggactcgcttccgactcttctcgagtgcggctccgttgcttttggatctccgggtaagacgttcgatgttatccgcgccttcattaagccccttccattcatcaccaccgtacgtggtgtcctttccgcgacctcgtttcgccaattccttctttgtctccttcggcaatcggacaaagttggtctcttcgtaggtggtacgctctgcctcgcgctctcggtccttctttgacttgaccgttcggccaccatcaatgattgtgctgccgatactgggctcagccatgggtgcggacgacatttcagcgctgacaaattcgtcgatgacgttcgatctaatgggtctgcggtcctggcgttcgcgacgctctgtcgtaggcaaggaagttggcatgattctcgggggacgataaatgccgtctccgggactctcgacagcacccttggagggacgggccttcttctgctcggccactcccttggagaaggcagagacattgggccggtacgccatttcatcgatgtcctcctcattctcgctaccgtttacatcttcgtcttcatccgatgatgcttcgctgcctgatgtcgcagctttgcggcttttcttggtcttggtcggctgagccttctctgtccgctccgcatcctctgcagctttgatgaccttgtctatctggtacttcaatcgtccttccaaaggacggacaccacgctcgaggaatacccgaagctcaatcaatttcttgcgaatatcatcttcgagggagttgtctgtagattggctcttctcttttggggtttctttcgctgacacatttcgcagttggaagataatcagaaatacgagattttgcaagtaggaaagaaggatttcgctcttggtgtcgaggagagaaatgccgtctttgggaggctcgatcgtgacatcggagggcgcatccttgtgtggcttgggtagagaggaggcagttgtcgacagacaattattcagagtctctagcaatgtcggtagactttgagggcgcgcagacgcctgtgttggagccatgattgaaagttgatggcttatagagaacaataattcgcgaaacaaaaaaaatttggccgcttcgacgataacgccagtcacgtgtgataaagacaaggcaccaaggcactcttcgatgatcgatcgtcattgccagtctgtcactcgcagttcgcattttatctcccttcgagtatcgcgagtttctcacggatgagaacgtgattttctctttctatggtagatgcttgttgtaaacaaccattttttctttcacaatcacccattgacacactagctctactcctttcctctccgaaacaagccattgaggttggtttctaggctttcaaaagtctatagaaacacccaacatgcggttcgccgatcgagcctttcttctctcgtcgaccctactagcaatcccttctttgactacggccttttatctgccgggtgttgcgccgacctcctacgacgaaggacaagcagttccgctttatgtcaaccacctcacccccagcctctctcgcgatgaccagcttcattcggtcttctcatatgactactatcatccggcttttggattctgccgaccagcagatggtcctaaagatgtgagggaatccctggggagcattctattcggtgaccgcattcgcacctcgccattcgagcttcacatggcaaagaatgagacctgcaaatcgatatgtgcagaggccaaattcgacgcccgcagcgcaaagtggaccaatcgacgaatagctcagggctacaacattaactggattgtggatgggctgccagccgcgcagttgaactatgacggcgttaccaagaccaaattttataaccctggcttctctctgggtgagctagatgacaatgggcaggctctgctcaacaatcactatgacattgtgattgattaccataaggtgggctttggcggcaaggataaatatcgcgtggttggagtgcttgtccagcctgagtctcgcaaggactcccggaatttagaaggcggggccgctgaatgtggtaccccgggcaatgttctcgcgctcaatgaggacggcgagaccacagtcacctggacgtatagtgtgtactggaaggagtcccccacagcctgggctacccggtgggataagtatcttcatgtctatgaccctaaaatccactggttctctctcatcaactcggctgtctttgtggttttcctcgtgggtatggtcagcatgattctagtccgcgcgctcaagaaggatattgctcgctataacaggctggattcgttcaacctggaggatttggatagcacttcggctgcgatcgaagatggagtccaggaggattctggctggaagttggtccatggcgatgtcttccggtgccccgaatctccgttgctgctgagtgtgatggttggcaacggcgcccagctatttatgatgactggtgtgactgtcggtgagtagtctgactcccgctcttcttctctttgtactgatttttatttgtagcatttgccctgcttggtctcctctctccttccaaccgcggattcctggctactgccattctcctaatttccgcccttttcggtgggatcggtggttatgtgtcggcgcgagtgtacaagacatttggtggcgattcttggaggcgcaacattatcatgacacctctatttatacctggcattatattcggtactttcttcatcctgaatctctttgtttgggccaagggatctagcggtgccgtaccatttggaactatgttggcactggtattgatttggtttgttatcagcgtgccattgagcgtggcaggcagttggttgggctttaagcaatcggtactatcaaattccaatcccgttatccagacattccgatgactaacttcatttcccaatagccgcttgagggtcctaccaagacgaaccaaattcctcgacaggttcctccgatggctggtagcctgcgcacaattccatcgattctgctgaccggaattctcccctttggtgcgattttcgtcgagttgtactttataatgacctccctctggaccaacaagatctactacatgttcggattcctgttcctctgctacggcttgatgatcattacctctgcggctactaccgtcttgctggtgtatttcttgttgtgtgcagagaactaccggtggcactggcgcgccttcataggcgcgggtatgaccggaggatatgtctttttgaatgcgctcattttctgggcgacacgggtcagctttggtggattaacgggggcagtgctttatgtgggctattcggcgctgatcgccttcattgtgtttattctgactggtatgtttttgttcccatgtcttgcggatgggcttcttttgctgacttctctccaggctccattggtttcttcgccagttgggcattcatccaccgcatctatggctcgatcaaggtggactaaaggttttgctattggtgtaacatttagccttgcatttttggtcacgagagaagacataccctgttcttgtgtctgtttttgtgcccttcttttctttccaaaaaaagaatcgttctcaatgcttggagaggtctcatggcagatagatagttgtttgatatggagaaatgtatatacgcggtaatgagattgtctgccaagcccagcctcgggatgttctggacctccgtcctttctcgcctccttcaacctcttctctatcttttagaaactgcatttcttgtattaacccccttattatatctttcctcttacgtcgccggggccccccttgcgcagacatactcagccacaacccagccacacatcccacctgtttctaccccgcgtcaccactccgggctcattgcaagccatcactcccagatttgttttgaacttgctcttgatactgttctagagaactattttttgatcatgggaaagtcgtaagttctaaccatcctctcaccctgtttgaaatggcggtggaacggactccgcggatctcaggatgcgcgtcatctcgggagcaagccagtaccaaaggccccgtacttttggtctgagaatcacgctgaataccctgcctacattcaaaggagaaccctgcgctgaccctcgtgtttcacattctacagtcaatctaagctttcaccgacgcagctcgatgagctgcaaagggcaacacatttcgataagaaggagctacaacaatggtataaaggtatgcggatatatgggaaacatacgaaacatcaagtctcaagagcgatcgctgattatgggcatgtctaggatttctcaaggactgcccgtctggtactctgaccaaggaggagtttcagaaaatataccggcagttctttcccttcggcgacccgtcatcctttgccaattatgtttttcgcgttttcgactcggacaacagtggtatgatcgatttcaaagaatttatctgcgccctttccgtgacttcgcgaggcaagatggaggataaactggattgggcattccaattgtacgatattgacggcgatgggaaaatcacctatgaagaaatgctggccattgtcgaggcgatctataagatggtatgcacaatgcagttcgtgaaatcacgatacccttaaaagaactaatgagtatacaggttggatccatggtgaaactccccgaggatgaagataccccagagaaacgcgtacgaaagatcttccgcatgatggacaaggatgaaaatggcagtcttgacatcgacgagttcaaagaaggcagcaaacgggatgaaaccatcgtcagtgctttgtcgctttacgacggattagtttagattgcttgggcgaatactggcgcaatgtgaggcattcttttttggacgggcgagggggttgcattgcatattctctgtcttatctgttttctgtttctttactttttttttctcctcttgtcatatttttgattaccccctcatatcttttgtatatttgagacaagtacaaccttggtagtgaagtgtatgtatacggtagtgtctgtcaacttggctttgactttgatcggactttgacgctgtgttcttccaaagacgacaacctcctttaggcagagtgggaatggtgcgctggctttgataaggatcgaaccagtccattgtcgcctcgtatacggagtatagtatgtcacatcaaaatcactcaagtcggcccagcagactaactaccagctcttctccattctatctggaattgatgtacaagggtatcgggaagacgcaagagccagtccccggcatgcagggcgcgatctaatatactggaatgagcaaggcaaggaaacatgggaaaggaaatatgtatcaaaatcatatcagaaacaagaagaaaagcctgttgatcagatgatcaaaaaatagaagaaactcgtgagacagcgtaaagaggaatcaatatagatcaatatcagcccagatcaaccacatgctaatgaaacaagcacgaattgcacgaggtccggggtgcacggcagacagctatcaagcctcagaagcagttgcgcaagggacgagcagccttctgacagtgggttaggatcatcggcgatcaaaaaaccagctgctgcgcttcccgggcgcttcttgcgattgtacgcccgcaacgttcgaattcgccggcccgtcaccacccccgcggagtggcttcgcgatgcgcgatcccccgaagctaaaactcgcattcccatccatgctcggtaagccgcgggtggaaccttgcttcgctgcttccagacgttccttaacagcggtgagttgagcttcgaatctatcagcgtagttagtatcgagtatcaacaagcgaaatcagggagaataagtcaacgcataccggtggttggcttgggtaagcttttcttggctctcctggagcagggcttccaggctggcaatacgctcatttcttgcaatcagtttccgctcagcgattgccacctccttcttcaaactactgttttgttccacaagttgacgctgcacgtgggttaattgctcgaggttgcgctctaagaacgccatcttcttctgctgagcccggttgttcgacgatcgaaggacgttgttatactgctctcgtgcatcatccagggagatttccaactctacaacacgctcgcagcggttctgcaggtcacgcatgagagacttcttcatggcatcgaactcggtaatctgctgctgcaaggtcttgcttgcggcaccattggtggaggtccgggactggctgtcgacaagcgattgtcgcaacttggtcaactcttcatccttgcgtaaaatgtcagaacgaagatccgcggccgccgcagtctcagcctcattctttgccacgtaaacgtgctctagccttcctcggatctcttccacatcgccctcgcccaagttgcgcgtcaagagatcttcatactctcgttgaaggccatctagcctcttttccaagtctgcacggcggctgtcctgcagctcaccaaagtcacttcggtcgttcacggtcagctcggcttgtcggataaagccttgcgtctcgacaagattcgtgcgaaggtcaagaatatcgtctggtgcaatgagttcacctgcagagctgatttggtgtagagcatcgacgcgctggatgaggtcttgcagcttgcgttcgttatcggagaacacgtcgccaccgaggtcaaacccagccatcatcttagccattttctcagtcttcttcttttctttctcatcaagtgctgcagtagtctcctttgccctcattcggacatccagaagctgctgcttaacttcatccaactcgcctgtgagttccgagttggcctcccgaaggctatccatggtgatagcggcttccttgctctcataggagaccttctcgagctgcatacggagctcgttgacttctgtgcccaagcgctcattatccttgccggttcgcgcgccattctccttcatggacctaagctcgtcgcgtgcctcacggaggctgcgctccacgttgacaatatgtgactccttctctgaaagctggtcttggaattcattctcacgacgcaagaattcttcgcgctcgtccttctccagcaccaagctgggggtgctggaccgatctccaacccgtgaatctgggcgcggggtttctgaacgcgcagtctcctgcagacgtgaaggcgtactcggccgtgggccgcgggcttcagccttcgtgtaactgacaacttcgtttcctcgagagggggtccattggtccttgggaacgctgtcaccgctacgccacaggctgacttcgccctcaagcgctgagatgtagctttcgaaattcgtcatttggctttgcgccttgcgcagcagttgcttcatctccgaggagctcagctctgcattgaccttagccttgttcttgatggccttggcgcgcacaccaaaacgcaaggttgagattgtttccgcatcgttgtagctgctaggcgaacagttgataatcaaagtcgttcgagagttaccaccgagggattcttggagaattcgagtgagtttggagtcacggtaaggaatgtgtgtcgatttgccgtcggtcaatgcgttgattaccattcctagcgcacttaaactcttgttgatcttcttggcctcctccagagtctggccacttgcgccggtctttccgaccttttcgctaccagccaaatcaaccaaaaacaattggccactcttagcagacccagtctcgacattcttctgggtgactgtgatcacgaagatggagtgggagcgggacgattcctggttcatattggttgcagcgacggcgcgtgctgctcctccccggcgcataacttcgtagacctcctgcacgctagatacgtagacttccagcaatcctttaacgtaaactccacgagctttctcctcgtgaactggcaagttgtcgttctggggcacgagtaaatcacggatccgctccatgtaaatttccatatagctgacccgcacggtgtactcgatgttgctcgggctggtcaggatgctggcgaagatttgctcgatcatgcgtggaataatacccttccctatgtcatcatcgatgtcggaacccatcatcgtatatgattttccagcaccagtctgaccataagcgaaaactgttccattatatccattcaaaatatcgtccaccgtcggtcggatagagaagtcaaagatatcgctttgcgcggtgtccatagggaacacccgatcaaacgtgaaggcccctgtgttctctcgggactagaattccgtcagtatagcctcgtgagttatggcttcagttcggactcacattgatgctacatgactcttcattttcgaattcgacaatgggcttacccccagaggacaattcgaccttgttttgcggacggaacctagcaaccactatatatggccaatcagtccaagtcctagtagaacgcactttattttattatgccagtctgtgcatacccttgatggtgttcgaccccgcggacctgtggaaccatattagtgatggccaacgcacgatagggccgagcgtactcacgccatatttgtagagtgacttggctatgacacgcgcaagctagaagatagagcccaaaaaggggtaggtgggccgcgaagttcgtcagaggcgtttcaaatggaaactcgtctgttgcggtgtagtggctcggaggaggggtttaagggtcagggggtccacgtgcaacgtggaccaaaacgagcaaggaacgaagagaaagataaagcagcagtcaggccgcaaagaaagtacggccaaaccaagaagacctacaatgggactttgcaggggagggggttgacgcgaaagagtgggatttcaactgttgactgtgaccccgtttgggcttaccgcccccggactcggatatgcaaccatcctgcagataagcttaatgtatagggaactatacaatgaagcatatgattgcacgtcttgtttacttgcacgcccatttatattccttacaacgaacacgtcacaggatcaaagcgcaaggtttgcaggaaatgcaggctaatgcactaaaactatgcgactaatcttgtaaactcggatgacatgacttggtgaaggaggaaaaagcatgagctagagatatcaaaaaagagagagaacatgaaatgaaaagaaaagaacgtcaaaaaaaagtggggagagaaaagaatacacaaactgaaagaataagataccaagcgccataaaccccatgctgtgcagatcaaaaggtcaagctgctgtgcccattcgtacgaatatcagcgcatcgaactcggctgagcaaatgagactgctcagtctcagttgtcctcccagcttttctcgaccgtctcacgcactcgcttggtgtactctttacggttgtctttgtagaggttcgaggcctcgacgttggccggagacgaggtgttggggtcattcagaagactagaattgacgagccgcacattagaatttgtatagtgatctttcatagacaagccagcgatacctttgaatactagtaagaatagccgccacatcatatgtcggactccagcggttctgcagaatatcgagacagagctcgccggtcccgtacacattaggatggaacatttggcttatgaatttcacacccgggggtttgttggggtattgttcttcaaaattcatgaccaggcggaatgtgccatcttcgaacggtgtatcggcggggccgatgatgacggcattcctagcatttcatcagaatcattgtcaagagcctcaaatcatgccgcggaagacacataccatgtcatgacattatcagcgactggagatgcagagacaccagctgggggatcggtttgcatgcgctgtgagtatggaaatgttagcggggcaaatcatcttggacacagaacaccggggaagaatttaagaagcaaatcgggctcatagggatagctttatatgagattatttatgggtacagtagaaacgtctcgaatagcctaaggcgaggtgacaatattgacgcgtaccttgaagtcccgcatcagacgacgacgggcggatgtagacatgatcgaatcggggggaggcggaaagtaaatgaaatggtttgctaaagctgtgtgtatgtagctagatatcaggatttgcaaatacagtcagaagtgaagggaaagaaaggagaggggaaggagaggaaacccgacaggtcattgatacggtaaggcgatatgcagcgaaccgatagaggggaagtccggatgaactagcccaatggagaaaccaccccaatcaggctagagtgaatttccgagcagtttcccggggccccgggaaactccacggctactccagtgctgactcagcaagaattatgtgacctcgggataatttccttaacaaaaacttttaactagcgctttcccaaggttccaaggttcacctaacccgaccgcctcggaagaagcctcggttcaagcggagtggcggttgtaggcggttataagggcggataattttcaatacatatgcagatgcaacagcattcctcagttcttcgtccttaatcatcccttctcacaatctgatttctcaatactgtgacctcacccactcaccccctcatcttaaaacaaagtcatgatttccgcaggcatgtctgctcgtctccccaaacgggtcttccccgcattttgcccccagcgacagttcagctctgcacgcccgacatgcaaggagattcaggaagcttacattctgagtgcatctcgaacaccaacgacaaaggtgggtacctttagagaaatctcctctagaagaacaattcgctaactcccaaggtagttcaatggttcttttgcatccgtatcagcacctgagcttggcgctgttgcaataaaatccgccctagccaagtccaaggtacctattgagaagatcacggatgtgtatatgggaaatgttttgcagggctcagtaggccaggcacctgcccgtcaggcgtctatatttgccggtctcccttccactgttgaagccacaacaatcaacaaggtctgcgcttctggcttgaaggctgtgtcacttgccgcacaaaatattcaacttggcttggcagaggcacaagtggctggtggtatggagaacatgagtcgcgtcccctattatatggcacgtgccagccaattgccaccctttggtgagatcaagctagaggatggtctcatcaaggatggtttatgggatgtttacaacaatttccacatgggtatctgcgcagaacatactgcgaagaaccacagcgtctcgcgggaggagcaggatttatatgccatccagtcatacgagcgcgctcagcaggcatggaaggagaacaagttcgccgacgagattgccgcggttactgtgaagggcaagaaaggagataccattgtcgaccgggatgagggcttcgaaaacttgcgtatcgacaagttgaagggcctgaaacccgcctttctacgagatgggagtggtactgtaaccgctggcaacgcatctagcatgaatgacggagcatccgctctgatcttgggcaacagggatattgctcgcaagtatggcggtggcagccgtgtcttggcccgtattgtttcttcggccgatgctgccgttgaccctgtagacttcccagtggccccttccaaagcagttcccctggcgctggagcgtgctggaatcaccaaggaccaagtggcggtatgggaattcaacgaggcttttgcggctgtcatcaaagccaatgaaaaggtcagtgccgtatttgtctaacttccataccagatctaatttctagctcctatagattctcggtttgcagaacgccaaagtcaacatgcttggaggcgccatctctctcggccaccctcttggcagctcaggctcacgtatcctcgtcaccttgctccaccaattgcagcccggcgagtatggagtggctgcgatctgcaacggcggcggtgctgcaactgcgatggttgtgcagagattggatcgggtggattgatttcaccaacaatgcaatgtcttcggtggcaagttatgactgatgccctcaaacgaacaatgcagacttggatatcatcccgtgtagcagagacgtgcacttttcttggatttggaatagcggattggccgaaaattgtatttactcaccttttatgtataaactcatcgcctgtttctttgcggacctttttatatggatacattagtactatgtatcattctcgagctattttttcttcatccctttccttagatctcttatatatatccataaagccattaatctatctttcgctcccgttttgcaactttgaagtgatctttggaggattcttagggtcttttgtggttggtgcctgattcctcaggaatcaacccagcagaatgcaacccaaacaaaagcagactctggcttttcttcttcatatcctcatgctctacctcgcgaacactttatataccaataatgctgacacggcaaggatccgacatctgacactatgctgaaccctgtggccctgtcattatctccgtcttgccatgacgccatttcttggtccccggacggtgagcttgctatcgctgcgggtgaatactttcaaatcctggtatttatctagttatccgatgagcttcaatataattgacattttcatagacaccaaaaactagcagagatgaggactctgcccccaactcaacccaagattggctcataactcgtgttagagccaacttgtttacgaactctgaatggccgaactaccttccgggaaatcgagatgatttctcggtcgctgcagacctttcagaaagcaatgtggtcggtctcgcttggtccccagcaggactaggcaaatatcgacgtagtgtcctagccgtgctgacgtctaatctggtattgtccctctgggagcccattggccttaagaagcaatggaccagggttgccatcaccaatcatgtattttggtcacagctgcagccatcacaggacccaagtagccatgcctttcggaaggttaacattcgatctttcacttggtgcgagtctttgaagccatcaacgcctaccgcgggcgcttcctttttacattcgcacgaaagccgctggggaattccactgctaatggttgtgaacgatttcaatgaagtcatgctagtgcaggttcgcagatcagacccaacgaatagcccttccaagccctatgatcttcagattctggcgtttcactctctaaagaacccggaaaccaaggacagtccgttctgctctggatcgctcttcgagaaggcaatgaaagagagacaacgtactactgtgctttcctgtggtccgtggcagatttcacccgcgacgagcctggggaactttggctgcgcagtcaccatgatagctgcggtatgcggaacgcagcttcggctaatgaaactcaaagtgactctcgggagcgagctcggggagacttcacaacagtacacgttaagcgccgatttgacagagcatcccctggatcaattgaatgagaaatgggcatatcacaacatcgctggccctcttagatggctccataccgtacgttcgatttcttacatccatgctaaaatgcgccatttctctaataaaagcctaacagagatcatccacaaccattgtcctggcagtgggcgccatggcagcattcatcgccatatctatgccctacgatacgtacacaggtagcattagcaattctgatgccttcgtatttcatgactatccaatctacgagccacaaaccgaggacaacaagggccatcaagcaaggcacctggagccaatttcgggtatgttatttaaagacctatgaggccctttcagcacttctgaccagctatagcaatgctcacttccgtgaatgaacaaagcgacacatgcaagctctacttaggtacactcggtggaattggcttagtcacagaacttcgccaactacaaagcaacagcgctctgcaacaaccaaaatggaaacgcatgattgaagagtttcaggatgactatgacttagagcacgacttgggaggaatgtcagtttccaggatttggggactcgcagcctatcgcaacatgactgcggctatcttcacttcacatcccacggacatgatcgagtatcgcatcacctctgacgacaggtctatggttgtcttttcagaagagagtggacccacgatcaatacccaagccctatttgcggcgcaaatccccgatgatcataaccagacaggagaagtgatacgtttcgtgctacctggtgaggacggcaatattgaacccgacatggagagtcaacgcctgctttatgccgtagcttgtcgttccattgtgggtgaagaggacaagtcgcttcggcttcatactcggcggtctctagagcgtctagcagtagtaacaggcgcggacctgagcgatgagatttccaaatgcaacagcaaccccgtcccggtatctgcgaagactatggatcaggtcactggcccaggcggccacatttatgagaagtgcgaagtttgtaatgcgggaattgggtggccctcagcccagttggctcagtgcgccaatggccatctttggggtaagtcacctcatggtttgaatttgatagtaacgtgctgacagttttcattcatatagaacgatgtggattgtccttccttgccattcaaggacctgggatatccaagtattgttttgtctgtcgcaaagaagctctcgatgaagaactcgtggcatgcatgtgtggaggaaagcaaggtcgaacattcgatgctctctttgagacgtttgatatctgcttacactgcgcagccaaattccaggccagttactaggtgtcctcagatagaatctgcaataataacagtgtctccttgatggctagcggctgcaaaaaaagacaagatatgtgatgtgatattgccacacaatgcttccaacggataatcatattcatatcatttacagagagctatctatgtgagcccaaaaagggaccccgcaataggatcccattcgtcgtcccatcggcgagagctttctttttgggcacctagacgaagactttccaatttgtcgttctcaccgaacaggtcgaccaagtgctcagctagctcctctgagcttccaaagcctaacccattcacgccctcagtgaccagctcgggccatgcttcgaaacgatcccacccaacaacaggaagaccagccccgaacatatctacaaccttcatgggcagatctaccccactgctgctggtatgcagactaactcctagagatgcggatgccaatagccgagcatattctggtacactcagccacgcagttcgaattgtgactttctgtaacttgctggacttttcaagggccgcaatctgttccaaatacatctccttttgtgggccctttcctgttatgatagccaaaatctcggggaggtgaggctgcactgtgatggccagttccgaataccggaggagggcatcgatgaggaccgagaaatcttcatccgcagtccatgacgttgaactgactagaacacggagagaccctgctttcaaatatgagtgaaattctttcgtttccggtagagtcgtgaggaaatccattcgtgcattgggatcgaggataggattgaagtgactggcagggcggtcgtgcagtggcaggacaggagctggaaggttgaaatccttcttgagaacggatgccatggcattggtgacgcaaaagtgggccgaagcagacttgcaaaataccttctcataccatatcgacattttcaccaatggatgggttgggccgagttttaacgcaagtatggaatatccaaaattatgccaatcaatgacgagccttgtttgccgcaggaaacacacaagggaggctatagccagtgtaggaatggaaggcgggttcttttattcaagagggagtcagtacttcaaatgaagactgaggaacctccctttcagacatacctgaaccaaaagccattgggacggttttgtggtgtatgcgagacacttccagagacaggcgatctggaatagtaccttcaagggcccgtaaattataaacagcagcttgttactggtctgtaggagagcgggatgcgggcgaagcggaacaatcgaaatgttggggttagatatgatatcaggatgaggatcagattctgtttcataaacggtggttagcgatcctatcttacgttctgtatcaaggggtttgtactaaccattatacccaataattaccacctccccgccatgcttcgcaatgctcaatgcatgatactgcatgcgcgggcttcggccaatgtcaccaagaacaagtatttgaacacatgtcttgcgcctttttgcgtcatcggatcttggagaccctgcttgttctggttgatattgcgaaggaagtaacagaatcaacacagtgagggcgctagacaggccgaacactatgctgatgaaggtctcgatcatgatggcaatggcacttcaagtatttcgctcatagtattgatcagccctcaatgacatcaatgatccttagagagccaaccagcagagggaatatccacagttcgatgcttaggaagtgctcgcggctccggtgtcccgaggtcaatcatccattccgatacgtaatctgataaggattcacgtgattccccttatgagaacctttggggagacgggcctttccttagagatagtggcaatttgtttgggcctgtacgtggcgctcactttccccaattatattactttccttttattaccctccggtcctattccgcaatgctggatctgctgacaacctgcccgctaatctgagctctcgcccgctccaccctcgatatcttggcagtgccccatctcctatccttttcgttggaccttccagctgctgcgcaccgtcagcatctgaagatcatgtcgacgggggcaccgtctctgggcgtggatttcacaccacccaatggacacagtcataatcatagtcatggtcgcagtcgtggccatcgatccaaccgctgggcgcaacctccgccttccctctcacagccagctgatgccacctttcctgaacaaccggagtcaatcaatgctatgaattcgacttattcatatggggatacacatcaaatatcagcccacagtcaccatgcgcattcgcattcgcactcgcactccagtggacaccacaatcataaccatagtgtgtcatctcttcaccacgatgtgctagatgaccaccatttgaaagatcccaatggcggttatggaatattatctacggataccactatacaggcagactatagtccagggaatatgtacgtggggttagaatgttattgacgagtaaaagctgaccctaattgcagcaacgagattctgactagtgcactcatcgtgctgccgtgggttacgctttcttggtaccagagacaaaatgcccaaagccaaaatctatctagcgaaggtatacctggtacaactgcgagcattactaccgggcaagttagtcagaagacctgccttttgacagcgctcaccctcaccctcttcggctgtggtcaaatactacgtatcaactaccaaaaggctggctcgtccatgctcttgtccgttaatttccccaaactaaatgtgaagaacgtccaaacttcacttttacaaattgtctcagtggcactgccaatatttgcagcgctcaaggtcggaagttttttggttgcatttgcgctgcttcttgcgacggcatcgagggtcccagcaatcatcaatagagcttcgcacactcaagagaaatacggtcgaaagatcctatccattaccctgttagtggtggttattatatcgagtttccttgggctgaaccatccttgggacgtatctccagtcattggatatgccgccctattaggatctgtgtttattgcgcctcccccattcccctctctccgtcatcatagacctattcctgagcctggtcttgttgctgcacagagcaagacttcacgtctgagtcactcctccgctgtggtcacgactgatgcaccactggccgttatatctgggtcctcccttgcactcctgagcatacttctcaaccgaggacttgttttcagcatctgggaactggtatatctccttattccgacgggtatatttgctacttctcttatgattttcctgccctccagcccccgctctcccaaaaaggccggactcgccatttgcgccggagctgcagcttttctttgttccccacatgtccaggatgacttgctcatggtttatgccacacgtggtgtcttggctacggcttctttctttgcctctcgaagggatgacattcatttgcatctggatacgcatgcgcatagccacacgcacattcattcacattcacacacaacatcagaatcctcccgagtatcaaagtggcttcttcataaaagcgaaccatacccgttgctgcacagcattctcaaagagaaggattcccgtagcatcttctacttcatgtggtgagttatgaaatccaataattgtctgtcctgaattactgctaacattttcagcctgaatttcacttttatgcttgttcaattatcatatgggttcctaactggatcattgggactgcttagtgacagtattcacatgtttttcgattgtcttgcgcttgttgttggtttatgtgccgctgtcatgagcaaatggcccccgaacgctcgattcccatacggctatggtaaagttgatactttgtcaggatttgccaacgggattttcctcatgtgagtgttgccaaagcggtgcgtagaggcaaattctaacaacatacaggatcatcagcgttgagatcatttacgaagcggtggaacggctctcatcggggagtgaggtgcatcgtctaggcgagttacttatcgtcagcattgctggccttgcagtcaacttggtcggaatctttagcttcgagcacggtcatgctcacgggcatgatcatggccacgaccattctcatggcaatgagaacatgcacggcatcttcttgcacattcttgccgatacgcttggttcggtggcagtcgtcatttcaaccattctcgtgcattactccggttgggccggctacgacccgttggcatcatgcttcatcgccatattgatcttcgcctccgctgttcctctagttagcagcacggctaagacgctgctactcactatgccagccgacaccgaatatactcttagggaaacactagcgggagttagcactttgagaggcgtggttagttatacagtgcccaaattctggcttgatgatacaggaccggtatcttccgggcatagccattcccatgaccattccgagcatggggactgtgagaatcaccatgatcatagccacagccaacaccatggtcatgagcagcaccacgatcatgaccacgatcatgcccatgaccatgaccatgaccacgatcacgatcacgaacatgcgcatgagaagaagccccagaatattttcggtgtgatccacgtcgtcgcttcccggggtgcagatttagaagacgtacgtcaacggaccgtcgacttccttcgagagaaaaacatggatactcttgtccaggttgagcgtgacggagatgcgcgctgctggtgtaacggtgggagtaagggcttttgattggtgacaatgtttcaaccatcatcaactgttctcaaagggaagccagggtttacggtacatttaatatcgctttgccccggccgatgtctatatatctcttgtacagataggattggatcggttcgccgaaagattacaccgatcaacagcacatagttttctccgcagcatcggaagtgcaaggcatatacttcaatgattcaataacgaaccccagttcttcatcgcatcacatgtaggcgaaacctatcccggaatccttcaagggtgaaacttgtacgacccgtctatcagttatagactgtcctgaatggatatccttgatctgagccctacatttctcagacaaatggagtgcagctccgtcggtgcccctgaggccagatctccgtgaattgcgacacgatgctccttcgggtcacacaattacattgaacctcggcagcacatggcgcgaaagtccagatctacgtattgtgttattctgacaagagcgaacctccgtttcatctcctcgaggttgccagccttgtcaactaaatcggcaccaccggccaacctgccgggccgcggctccagaaaaataacctgtagcatctgaaccgtacaaatggaagagtgacatcgagtcttgtgctaccaaccactcgacttctaggtttggacagaggatgttacgacattctatataccttccgacaccatcgcaaccccagccgatcctttctgtcattcttctacagagcctactacagagatatcaactacactctacatttgactctttcgtccagtatattcaatgtcatcagcttcagcttcgaccgcaaaatcaccgtatgccgacgaagtcgtgcgaggaggatatgcaaaaatatttgagggccatacagtcttcctcaccggaggtactggctgcctagggggttgtctcctctacaagctagctctgcaactgccaactcgcaagattttcgttctggtaagggggaactcccagcgggctattggaaaactgagggaatcgataccaaatcatgcacaggctattttagccacgaacaaagtcgagtttgtgattggagatatgaagacggtgaactttgggattgaagctactatccttcagcaacttcaagatcaagtgaccctggtcattcatacagcagccaagatcaaacttgaaggtcccattcgtgatgcactggagaacaattgtctccctgcgctggaaatggcacggattgcctctagattccggcgactgaaactcctcatccagatctctacgtcatacgtcaatagtcatcgtccggatggcacggttttagagcggatatatcaattgggaggcaaagaagatgcagaggaagaactggcatccatattgacgctgggcacatcacctcacgcgggcaaattctcatctacctacacccaagccaagcatctcatggaacgtctactactcagccgcttccctcttcttccaattctactgctacggccaacaatcttcggtcctgcgctcagatacccttactcgctatatggaccggaggactccacgcctctcaacaagtttactaggctttggttctctgatcgaggcgccacgcaagtttggcatgccacggaaggctataaaacaggcgccaatatcctagacgagattcccgtggacctcgtagcaaacgcatgtctattgcacgcagcagcacggactacgggcattgtccagattggttcccagctctatcatccgattaccttcgatgagatcttccgaatgggcctggaaaatgccacgcctgcagcccagcgagagtttccgaagatcatatttaccgaagatcgcagcacaccgcaatgctttcttgcggaattgattcaagtaggaactcgcaactggttattcgattgcgggcggtcctactggctcaaacaggtgagcgggccattgagcatgcaggtttgcaagcatgaggcagatgctctgaatttgacacggactcacgatgtcctcggggctctaaaggagaaagctcggatctgaactgagctgcagggaaattggaggctgcaaatcggctataagatactttgtagcccccgtaatcttcgagctatatgagacaaatatgaccttcgtatactccacgctacgtctatcataatacttcctcgattgatatttatctaggtcattttagagaaaggcttcctcaattaaaggtagcttcggtttaaataagccgagttcattatccactgtagtgggggattccagtataggataacccagcggccatatgatctaaaagcatccctgaaagatagcaacgcagacaccttccacttctcttcttggtagtcaccccacggtgttctcctctctagcaccctaatattcccactgacgactctgctctcacgcctgtttcgtaggcagggtcccctcttcacaacccagtaaacttgctgtttcggatgactagaaatacgttgattgagtgggccagccaacctgttaaggatcatagtacacagcaatagaacagaagctattaatatttatctatcgggtttcttcacattgggtttcctcgtgtgaattacaaaaagcgggtatagtatatcaaagtcccatttttttccgggcccaagccatagcattagcccattccatatccccgggatgcagtgcatccaataattcggagaccaatgcccggcccgagtctcgagcccaccaatgctggccatcaagctccccgagcaacacaccccagtgcatgagaatcaacagagatagaggctgtcggcgtcgcacattgtccacgaattccttgtcgctcatagcgagccaagccagaacattggcagcatcaacagaattgccaactctggctgagaaatgccgcagatagacaatagcatctttgttgacctgatgctgatcggggtcgatactagcgagggcctcatcgttcaaagaaccgagtcgctccagggcatcccgcatatcgctatctatactggctaccccactattccaatagtttcttcgacgggtaaacagctctaatttaatccaagattcaccaatccggtggatttttctcacgccttgcaagagttcaaatacaacgacaatattctccgttatgcttgaactttccccgcgggcagcagtcactcttggtagagcgatgcctataacggtggtgataatggactgcgccagcgcagcctcgcagttcattgggttgatactgtcaacagctgcgcgatatggcgcaaatgtgagattgtgatattggagggcgatatcaatgtacaccagcgatgccggtggctcgattgtggcggcaatatgaagagcccccagagccagaatgccgttcattaaaaaatcatactgaagagccaggcgaggaatggcaatctgccagacgtaatgctccgagctggaagagcaaagactcttataggtttctgtggaaaacttatgcataagctccagatctcgcaccgctgaaatggttgaagaaacgggagctgtcagcctagggatcctcggccgcaggggagtgtctataatagccaacggggccggggtctggcttgctcgtgaatcgggccgagccggcgctcttaaatatgtgcatgggagttcccgtgagatacaattggagcacggtggccccttttcgtcacactgcattcgttagtctcgtcatttgatggagcccgggacaatctatggggccatcccaagtttccggaactcaccttgacgcgacgtctcttgcactgatcgcagccttggcgagatttagtgtgcgctcggcgaggaggcatctcggaaaccacggtacctgagggtccatgtaaccggttcgctcggatccttcgagacgtggaagagtccaagcgcgggagagaagatgatgatgtggaggagtcacgtggaccgagactataaaaagacttccctgccttgttttctctcttctgtatggtttaatcttttttacagtttctaccttctacttcttcgtccgggtgtcagattatgcttatttgataatacttttcaaaacgccgtggtcgcttcgtcctctatttcagcattagccttacacagtcacatgtcccaatatagccctaggacggacttgaaagtatgaactcaataccgactgacattatctagattctacagattctacagattctagaaagaaatgtccatctcggaccaaaatctctcggaccaaaagcaacaaatccccgaaaggatcaaagcgccttatagaaaacaagtggatccggcgtaagcgacgtggagagaacgagaacgagaacgagaacgaacgagaacgagggcaagaaacagccaatagcgatgcatttggagccggtttcatcgtgttgaaccaatttagggctccacctgctggaggtgttgttgctgcggccccttgatattgagttgacctgcctgaaggctgataaatttatgatttgatatccaacccctccagggattttctccattgagagactcgaggcccttttccttgttatcccaccttctaggacttactctcactcagctctcttttactctccttcctttactctatatttctttccttttgattacacatctcactcaacatggcgggctatgacacttgcttcgaagtaagcccacaatgtcctgttgaactcacgacatacggttactaccccaatctcggcggaaacatcttcttcacggtcgtttttggcctactcggaatatgccaaaccggtctcagcatctactaccgaacatggacattcttgatagctctgctcattggaacatttatggaaatggctgggtacattggcagggttcaaatgcattataatccatggtcggcacctgcattcaaactccagatcgtgtgtctggtgctcgcgccgaccttcgtcgcagcgggtgtctacctaacgctgaagcatatcattctgaccttgggacctgaacactcgatcttgaagccgcgccttttcacctggatcttcatcggatgcgatattggctctcttcttttacaagctgcaggaggtggtgtcgccgcagctgctggtaacgatgacttccaaatgctcaaggcaggcgacaacattatcatcgctggtatcgccttccaggtcgggaccatggttgtatgtggattctttgctactgtcttcttctggagggtcttcaaacacggtgatgggtttgcgggcgagaagaacctcgatgcaccgattatttccaagtggctgccgttcgtcgtgggcgccgaggtctttgcctatgtcacagtcttgattcggtgcatttatcggtaagagccaatatgcgtacaaacaagacactttactgaccccgatatctagtatcccggagatggctggtggctggggaaacccgctgatgcagaaggagaatgagttccttctcttggacggaatgtaagtggtctcttggttcttttgaaagctggggaaatcatagctgacgtgtcattaggatgattactctcgcctgtctggccttcaccgtcttccatcctggaaagttcctcccatcattgcgcttcacgtccaagacccgcacataatagcattcttttatatttcttttgagggtgctctcggcgttttttagatactttctttccagcatgtgcctatgtcagagatgatatactctacttaatcagggtgtaatgaaaacataagaatcagttgtcgctctacatttgtgctagatttacgtcagattcggaaattatttcggaaatagattcgatccaaaccagacaagtacgctaaataaagctccagcctcacgaaatcgcaaagaaatgcaccacaaagtgaccagcgatcgagagcatggcaaattattgctcgctctatgcaataaagaagagaaaagaagagaacaccgctcgccgcggtacattgaagaagaagaaccccggcaactccatgttaaatcagacataacccgccatcttaaattgccgtgtataattaaatcgtgtctagtcgtccaacgtcagacggacgcaccgtcggacacgcttcttaaactccgcagggtcctcacgccatagccgagcagcctccacattcgccgggctctcgtcgtttgggctggaaagcatagagatgacggacaaaaggatcgtctcgggtgtttgcacgggagaccagcgttccgcagccgactcatagccgtatttgtcctcctcgggcgggtggagaatggaaatgcagacgtcgccactctcataaactattaaatcggagtaaattgtgagtaagttgtctgtgataaataattcaaccggaaccacatactattcggatggaagataggagattcgaacttcatctttggcggccggtgagggtattctgttgggaaagagagacgagccctgaaaaaaccacctaggcaagcaaacttgtgagtattcttcaatgcatttgtagcaacatatccctagacggcattatgtttgccacagcaccagtcgaggaattgacgtcaaatccatagagaaatgaggccatcacatacctccatacagcttcacatcgtctgatatcatgagcataacttcccattcgaaaacgttattatcgaccaagccacaactgatgccgggaatatccttatcggactgcatctgctgcagttggcgggacagcatgcgcccggcgggagaagtcgccatgctgatagtcgaggaagataaagcagaagagtggaagggtgaaattgggtcgatatctgaaatcgggttcaatgtcaaaagaaagacaaagagtaggagatgaggagacggtgaggggcgcaaaaagaaatgtaggcggtaaggctaaagcggggtttgatagcctagatggggaggcggtagacaccatgggcacgtaattagttgctactttgtatgtctaggtagccctggaggtatagactcgatgaggaccttagggttgtcgttatgtttaaatctcgtagtgcatgaggaaggtgaaagactattgtatgaggcaaacatttcaatctctcccaatgatatagatgtagcaaacgcaacaattacacacacatcccagcatttcatcatgtaccaaacatcggatctcaatggctttttactttcagctcatttagagtccaggggcacccatatcgatcggtttggcagtcttggaaatccaaaagatctgaccaccaagtaccagaagagcgaaaaaaccaagtgccacctccatggcaaatgtcttgccaataaccttggcgaagcggatacgggcagcccagtcaaaggtagtccatgcatccatgaggccgatcttgccgctgccaccggtgatggccggacggactttgcccccgaaagagcgatcaaatggcacaatagtctcatcctcctcgggaagcatggaggcagccacacggacaaagatgacacgagcgggcatagatatcaagaatgccaaaagagcaggaaccacactgacgcccatgaagcggtagatggccacaataggcgggacttcctgataaccggaaacatcgagccagccagcaagattggcaatggccatggggatgaagaaagcagcagcggtgaggacatcctggagagcagcggctggggcaatcttgatccaggtcttgtagctggggatacgctggtagaagcgctttggagagggctcagagataacaatgtgcacccaggccatctgccaagtagccagtaccacgctcaggacggattgaacgacaaactggcccaaatatgaattggtaggcacagggacaaaacctgacaggaacccacgggccatagtgtaggccacaaacatgctcattccacggaagcgagaccagaagccagcgcgggagcggaggtgcttcacagtggtgcgcagcttgctggtgataggcttgaggggagtaggagcgagcagctccggatcattctcgtcggttggcttggtgggatcgggactgggaataatgcgtacgtagatatcggggttggtatcttccactacagccagagtggagaccaccattccataggtatactcgatctgtcgagtgttagttccacaaggtgatatctggaaagatttttttacttacagaccagaaaacaagcccaatcaaaatagcagtgatagcaaacagagccaccaagcctccattcggctcctgcttctcaggcttagactgcatgtgagtgacagcaagctcggtgccccgacgcatcaggacgttagtgacggacatgatgaagccgacactggtgaatatatatataatatattcgatggaaaagagatggaaacacgaggttggaagtgcaaagatgagaggggaagacgggggcttttatctgatacaaagccaggcagcagaccactagcgccggagtcgtcggtacccttagagtacttagagttctgacggactccacctataattttaggtacctggcgtgtaccctgatcagcctcacgaggaactcggacactttcttggacatttccatttccctcgaacaacttttgttctctctatgggatggccatgtatctactattttgtactacttcttactgccttggactatttgcttcaaaattcacccaatcatccgatgatataaatagaaacccctgggatcatcggcgtccaattcctccgtgccgaccaaacattgccaggttgcctccgatcaccattggcccccgacatgttagcgctaaatccagggtgcctaggcgaagccggctcggccaattctccccatcgagagtgaaaaaaataaatgaaaataccgcttgagcctcaattgtctcaggcaaagtgtatatggctagaatttgccagcttgtatacattctagatccaatgtggcatgcccaactcccagaaatcaccagaaagtgactttctataaatatcggatatcaaccaaagatctaaaacgaaccccaacatgaccagaaagatgcgaaccaatcaaagccaactcatggtcgcagacaaccatccgtggatgggagacaaaacgctgaaaaaagagatcaatcatggtatgtacacaacaagaattctccaactttagtcaaataacttcttcatgcccttgtgtgccagctcaacgccgaggaaagtggcggcattggcaggcaccgcacgggcgagagcaggtccgaatccagggaagaaggccttcaaaccgccgctagcgtaaaccgagcggataacaccacccatggtaggcttgcccggtgcgctctgcaggcgggacttgatggtgtcaacggggaagacagggatccacatagcgataccggcggcaccaccagcgcacacaacggcagatagggagagctcgcccgtcacgttgccttcggcatccttgggggtcaaggagcgcttgatgtactcgtaggccgcgaagtaggcggccgagccgggaccatcacgggccaacgtcatggcgctaccacggaacacgctgcgaacaccaccttccttgtacagctggcgcacgacatccagaccaccggagtactgaggtttctcgcccggagccagttgcttctggccctggatctggaggaggaccttgacacgctcgaagggtgccgtgatcagggtcatggggatggcggagaagaagcctgcagaagagatttgtgcgatggagtactgcggggtgtcgttcttgactgggacggtagagaacttgctcacgagagtcttgcccacgtcgtaaccctaatttgttgttagtatcgcttccggacgggcgctcgcagctgcgggcgcagagaaaaagaaaaaaagacgaacccaaaagctgacggcaactgtgagacaggactgattagctcataactcgatcaatttcagatgtgagagccattatggcgcatgctagagtacttacacatgggagtaactccaacaagcggcgcagagacaccggcatacaatccctaggaaccattgtcagttcggtcgcaaagtattcaatgtgcttgtggtgatcatactcgagccaatccttcacgggctaccgtcttccggaccacatccatggcacctgagtaaactcccttttcggccgtctgcaggcgcaccttgactagatcaaacgggtgtccaacgacgacagcgcagagaccaccaacggcaccggctgcgagagagcgcagctgtacaattgtctggttgaccgccttggtctcgatgtcgttgatctcattctcaagctgctgcgcggtgggggaggtagaggaagacattgtgggcgagtcggagcggggagagacagggatggagatagggatggaggatgaggggagaagagggtgaagacagcaggggccaagagtaagatgggaaagtaattgatagcgcaataagaaaaaattgaccggggatcttcaaatgatggagacggagacacaaccgaagccgactggccttccccggacgaaggtgtgcctcggttcggcagcggaaaaaccgactccccgtggtagatactagcaagtaagaaggaagtctacagtactgttgaactaaatattatggagacatttggcatgttttgctgggtttcctataagaattgaattagaatatactcctacggcgtcagtggccccgagtgcgccagtccgggtgaacgggagagctcaaccactccacgttttccccgcggaataaaggatggctgtgtcaggattaggtttgctccatctctagcttttctcaaagggtataggtgcaggggagatgtgaagtgcctgtatcgttgcaaatgtgtacatgtacggagtaagtacttggaagtccgagttctactccgtagggtcgcaatcacatggaaatccacgtgctttatcaggacgagaattagtatttatacatccatacatccatacgtctatgcattcagatgcataaggaaaaaaaaggattcaaactgaaacacctcatattcagctactcctttaccccggaacttgctgtagaatgcaaggctgcggtttgcgccagtggcgaatccttctatctcagtcttggtacccacttggcgttccaaagaagagggtttgatttcttcaacccttccgtacggagtacttaattagtgtcaactcgcaagaagtacagagtataaatgcataatacagttttcattcattaagctcgattgacattatattaacagctccgtagagcaaagagagacaaacatgatggtacccatcaagaacccgttccatattgtacctatacaagcccgacgacggcaacacatgaatcataacccataaagtaacatggagtacatgcggactctacgcattcacatgtgggacgtttacagagcgaggatagcgaccaggccgaggacgcccatagcaccactgccgacagtggccatgggggcagcggcaccggagctggatgtaggagcagcagagccggaatccgagccagaggtagactcagagctgccggaatcggagtcggaggtagactcagagctgtcggagccgccagtggaggtggaagaggtgctggtgctaaccttggtcaccatggagccggaggcgtcggtgctctagagatatggtcagtgtggttttcaagaagaagatcaagtgtatcttacagtgatggtggaaacggagccagtgttggaggcagaggcctcagtgccagtcaatgtagcggtggtcttggagccagaggcatcagtgctagtcacggtagcggtggtcgcggagccagagacgtcagtgccaatcacggtgctggtaatcgcagaaccagaggcatcagtgctggtcacgacagcgacgccagtggttgtggagccagaggcatcagtgccggtcacagtagcaccggagccagaggtttcagtgccaatcacagtctcggtggtcgcggaacctgaggcatcagtgccggtcacgacagcgacgccggtggtcgtagagccagaggcatcagtgccggtcacggtagcatcggagccagaggttccagtgccaatcacggtctcggtggtcatggagccagaggcatcagtgcgggtcacgacagcgacgccagtggttgtggagccagaggcatcagtgccggtcacggtagcaccagagccagtagaagtggagtcaccaccagcaccggaggtagatccagaggtagagctggagtcagagccggaggtagagctagagtcagagctggagctggaggtggagtcagatcccgcgacaccgcctgcgatataatgttagtttaccatatcaagtgttcgaactactaatagtcacgtaccagggcacttagcgacggccatagcgagaaccgtctcggcgtcgtcgttggggcaggcctccttggtgcagtcacggataccgtacttgtagttatcgctcttgcacaggcaagcgaggtcaccggacttgcaacccaactcggaggccaggttgctcatgttgttgagacacatagtctagagtcgataaggattagcattgagtatgattcaacacgggattaatcgaacttacagcacactccgaggcagcagactcggcggcgaccatgccaaaagcggccatcaaggccagagcaacgggggagaaggacttcatgattaagaattaggggaggaattgaggattctcgaggtcaatgtgtaagggacgaggaattggcaaaagtggaaattgaaagaaatctgcagatggggaccttttataaagacaggcctgagaaacaaaaacaaagtctgcatcaacctcaccagccacctgccccagactataaattgagtctccatatttgacaaaagaggaataaagtggacggagcaaacggtaaagcccaatcaccatagcggtgtggattgcctggcaaggccaagttgggattgttctgcgacccaacgtggcgatgagagaatgaatcgattgcttaagcgatatgaagtcatcacaacatccgaatcctggatttgccctctgtagtggcctgaaatggggtgatcgccccggggatagctcacacctcttctccatcgtcgatctcataggtccatctaatttgccaggggccccgttcggaattgaattttggcttttggcttttccacgatgttctccattattggagccagccctcccattttgccgataggggaatccgtttggctggcatcattaggggtaaccaagattttgatggtggttgagcttccaagctttctttcctctctgtgttcaccgatttgagcaatgtttatggtcaagataggcgaagatcgacgggtcccaatcggagctgaggccggcactaaactggattgtcgaatagtcagagacaccccgatcgcactattgaaaatttgaaaactcagttgttgggacaccgctattttgtggctgaaccttgggacacagccacactatcaatatcaccatgccatggactcgacgctattccggactctaggctctacggacttattacggactactattatgtattccccgatcctgaattgtagacggaggtcggactataaactacccccgttctgtatacacagggttgattcccaagcttgtttcagctttcaagggatacccctggaaagaaactggcagctttgagatacgtaagaattgaattgaaatcatttgactcgcatcgtctccttcctttttttcttcaaactagtaaaatattccgcagatcggaatcaaacatccaccttggatgcgagatactacggactccacatgaagataatgcatggagatttacggagtatgtgctccgtacagaccttatatagagtacggaataataaattaaattgattaagctaggtacatagcactatccgtacaataataatatcaattgccactttactttgacacatccctaacccccaaggtttataccaggtttgacggcgtccggtgttatgaccatgtgctaatcttctatttcctgattgcactgttgacatttgaatatagtctagggctacgcgccaagcaagctgatatctagcaagtgcggctgtgcggagaactccgtacagcatgttcccgctattgtatgagcccacatcgactgaagctcccattcgtgcagacgtcaacatcgtgggaacctgcatagattcaccttggcaaatttgagacaccgctatctctgactttgtatgccccaaggctgctatcgctaactctcacaatgctgaggttcagtatctctactctactccgtactccgtactctagctatagttaggattgactggtaaagtccaacattgttagtaatattgacgttacatcgagtccaacgctacggagtactgcctggcttatctggacttccccgcttcgaaatcctccaacttctaaccttctaaacctccgcgacctagagagttccagttatcttaaaactcggctcggttcattaaaatggttctcagaagttcaaattcgccattgacctccgagttcgatgccttggtacagcagcagatggacaaatggaaagtccccggactctccatggctgtcgttcatggctccagcacctggtcaaaagtatgaagacatagtgcactttattattgcagaccactaaaccacttttaggcgtatggattcgccgagtttcctgatcgcaagatgaccaccgattctctcttctctacttgtagcaccactaaggcattcaccgcagcggccatgtctctcgccatcgacgatagaaaggataccaaattcccccttcgctgggataccccaatttcgtccatactgagagatgattttgtgctggagaacgactacaacacaatgcatactaccatagaagatgccttatcgcaccgctcagggctttcgactcacgacgcctgtttaaatttagtgcatccccagagatccctgcgcgaagctgttcgcaacttgcgacatcttcctatagcctatgcgccccgcactaccttttcctacaacaataacatgtatatggtggtatcccatgcattggaacaaattgaaggccgaactctcggcgagactctcaagaaacgtatttgggatccattaggaatgaacgacacatacttctccgtcacagatgtctcgaaggacccatctcttcgtcctcgactcgtacgaggctacacctgggacccagacaccaacacctacatcgcagaaccatacatgaacgacgtcgctgtgactggagccggcgccatggtgagcagcgtactcgaatacaccaagtggctgcgcgcgatgatttaccaagagggtcccatctcctcacagggccacgcagaactcctgaagccacgtacggtgatcacaaattgggatgagatcgtcgcacctcctgcggtcccatgccatctctatgccttgggatggtttgtgagtagttaccgcggtgagccgttctactggcacagcgggagctggcccggattcggcatcatggtgggcttcctaccgagcaagggctttggctttgctatgatgggtaatacgacgaatgcccgaaatgcgcaggtggagatctacatgcaccttctagatcagatttccggaggatcgcggatcccacacccagtggcagtgggccaggcgacagaactgggaaataggacgctcaaagccaagtccgagtgtgtggacgaagccatcaaacggctttacccgtctctgcctgatcctgtcattccccattctttacagttgaaccaatatacggggacatacgagcatcctgcgtgcagttctatcactctatccgtgcgaaatgggtgtttggttgcagatctacttgaccgtgctattccttcccttatcactctcgtccatgcaagcggggagttctttgtggcgcatcactaccagcctaggacaattggatctctctccggttactacgctacggaattcatagtgggttctaatggaattgctatggcgatgggcctggatgtggagccagctttgaatggagagaagatgtggtttgatcgcgagtactgattctcagttatataaatcggcattgtatatatatttgatatccgtcgccatccgcttgaattgataattgaaaaactcaccccctctgtcaaattagacctacatacatacagatgtagttgctactccgtatgtaaatcgaagcttattaccaaacccatgacactgactggatgccaggatacgaaaaatacagatgcctagcggcccgaaatggccattcggcgatgccgaaccggctcgggctcggtcaagtggagtctcaaaaatttcatctggcagaccagacgagcaaaaagttactgaccgacgcagggatcgaacctgcaatctcttgattcgtagtcaagcgccttgccattgggccagccggccatatgataatttggctaaaatgtgcgctatagggtgcggctcggtcaaggatgatttgaaatttgaaattaggtaccttttgtatggtatactcatacaaagggtactttattataaagttcaagggttgttaagtatatcaaacaaaaggtacctaattttgtaatttatcgttcagtgaagatggcgccaacacacggtatgtgttggggcgcttggcacgatcatcggagagattggatatatactcatttccaggcgtgtgtaatagagtcatatatacacatcagtaacgggatatacataaggaccaagaacagtagggtatgtaaatgcaagaaaacgccgtgaagaagccaaaataagatgccggttagaccgagtcattcgactctgactcggcagtgtccgccacgtaaacatgcagcaacatggaggccttttccgaaaccgtgccttcttcttctgagacaatccgggatcggtagcctagtaccctctgccatccaaggcacacccccaatgaggccagcagctgtccgatgaagaacccaaccaaacaagccaccaacccggcgacgacacctagcaaagcaggaacgacgatgggacggatgatgcgcataaaggagttcttgtgatggcggtagtgaggatgacggtgttcagcgtggcggtggaggttagcgggagtggcccagaacgaaaagaaatgagtctccggtgccgagcgggtttcattctcattgctgctaacctggatagcatcgggttgagcgggagattccatcgggggtgccgccgtggtttccgcggtcttgggcttatcgaagacggagccgaattgtgtcctccagtaattgatcacccagggctggctcttctcgtatagatgaccatcttgatcgctgccacgggctggttcgacacggatgcgggtcatctcgtacttgtcactttggtaagcaaggaggtcgacggctacagcgtcaggtgacaccaggttgttctgcagatcgaaccactcgactcgcacacggatcatgtccgcgatggatgccatgtcgttgttctggagtggctcgacgtcgagcgtgtaggacaattccacggtattgtcactagggtcgatttggtctgcgctgccatagaggggcgcattgagctgcattatcactgatgggggatagagttggtggtcattggcatataggcttccattctgaatgctcaaatttatagactgtatcatattaggattgaattaattgggtcaaaacagaaatatttatcacgcacgagtcttgatctgacgcaattttcgaggtcgtcggtggagggagcgaaagggagtcggagttgatgagaactggggacggcagaggcgagggcactgcccagagagagcattacccaaagcagctgcataatgagcagtgtaggatattgaagtaaataaagtcaatgacgtgcgatagagggaggggagaagaagagaaagaaagaaaaagagagacagcaaggcttataatgtacggagtaaacccttcgtactaaggttcggtccaatacaccttataaagaggaaaagcttagcgttggtctcagactattcttagtgtgtgtgtctcaactcgggaaatgccaatgtctcatccttcgcaagtgtaaccctagcacgctcacattaatatgtattacaacatcgatttgaacagctcgttcaattctctgctgcctaggaactatcgtgtactccaatggtatccacccaggccaatcccaccgaaccgacaccttgcccggatttaatttatcgtacggggtccgcggagagcgaactctgttcgacagatcgacggattcaagacagaatagttagttgcgggatcccaatgtagtaagtgatcgagtgatcgagtgctcaagaaatggccgacacagtcagcgtgtctgatgtcagattgaagaggcattcaccattggaccctgtgaatccaccttgttggcctgggagaaaaatgacattgaagaccatgaatcttggcgaactaagaaactgcaattaatacgagtacaaggagataccgacttgtatgatttctgtgtgttcgttggttcgtttgtcctgacttaccaatggatatcccacgtgggtggaggaatctcagattaattatctcgaattacctccaactctcgcaattctacacttccatttccaccaattgaaccggcttatttacacatcctatgtacagcatccatcgtgtctatattgcatcacacactcaggtcgcctggtaataaggcgcagtctgccagaaccggcagcgtgggttgttggtcaggtcccgcgtcgcctggatgctattattgccaatgttcatgagctgtgcatactggccatgctttcggaacaccggtgccagatgagacttgggcacgccatgctggacaaagctggtgaaataatcctgcatagccaacgccacggtcgcgttggtgactcccaggagcgaagagctggtcttattgtcgtagaacgtgtatgagacatcctgtccgtgcagcgcgggcgggatgctgaactcatacgcataggtctgattgtagaacgcgcggttgatataatcggtattgcactggaagatgaggtcggagatgacgagcgccgtgcgcgcgaccgagtcggtgtacccataagacccgttatagaccggtgggtagaggacattatagacaaagtcggacacgtttttgggagtgttcggtgacaaggtcttcatttgagtggccagaccggtgctcttgacgctgtccggcgaagtaaaggccaacccctcgtctgcgttatggccgaccatgatattcaagttggggtcgaaatcgcctcggagcaaaagctgccccggcagagcaggaacgaagctgccgtccacaacgggaccgtaggtgaactgtccccactgggacttggtcgcgacctggtacgcattggccgcgatcaatttggccgaaggcaatttccgggcttgctcaaccgtgctgacattgagaattcctaggaactgttgcagcgtggcttcttgctcctcttcgccaatgactgggacccagcctgggctctgcatgatcgcttgttggaagggtgcagcgccgcgggtgcctccatacgcggtgatctgatgaaggattgatcctgcgccggcagactctcccataactgtgactcgggttgcatctccaccgaacaggtgaatgttcttatacacccagtcaagagcaaatcgttgatcgtgcagcgctgcattggccgtgccattggctgtgatactgtcaccaccaagccagccaaatgcacccaactaagaaattagtattttcacgacagcgacggaaaatgtgtcgttgacttactcgataattcaaggcaacataaacaaccccatcattgtttccctgctgacttcgctggatcaatccggtggggtcggagctgctcttttctccccccacatagcctccaccatagatccacaccagcaccggcgccaagttctttcggaatgctgcggcttcacctttgctgcgttcgaagatcttcttaggcacaatcacatcgaggaataaacagtcctcagtagtgcgtgggtcttgcttcgccggtttgtactcgtaggaagagatgttggtggatagagggaaggatgtattatagaagtagctcaagaggaaggcttcttcggcagttgtcgaccacaacggggctgcctggggacagatctttcccacagagccattctgaatgtgatctctgttttgtttgggaagtacaggcgcctggaatcgcaactcgccaaccgggggtgcggcataacggatgttgctgaagttgtagaggccatgggagttctacttatgtcaggggtaatcaagatcaagctaaagaagagtcaactaacattgaatgagattgcttggtgcagctcatatcccagatcaactacagggagcttggaggccagacaagccgaagccagcgtcaacaacaacacagcgaccatattgacccctgcagagcagaacaaaaacacagggaaaagaggaccactggagcttccaggtttatattaatactagccagaaatcccgaatttatcccggtacaaagtaatctatgttgtatttcatccctacgtccgagtggagaactccgtacggagtatatgattgtccaacagagaacgagatcgacctcgtcatcgcagcttagtcagaggggaaatcggtcctttctatccgattaatatgggcgatgatgtcaaagcgagacattgcttctaacacaccaataagagatgagatcacactgcgctaaatccgggctgagctgcgccatccaggaaattgttggcaccgacttgcggggtactccgggaactacaacataaaaacgcctcgtcagatggagcacgcgatcaattgcctagaacggtgttcatttgttctacggtgaatcatcgacctcgcgaaccttatactcgaacatctggttagagggcacttcatgctcgttctggagtttcgcggcactctcggcgcccgcggctggcacacggtattcgaatcgtttcccacatgctggcacagatccgtcgggcagtgcatatggaaaaggcagatattcgggtaacagacccagttgcacaagtactgttgcctggtcccatgaaatgtgctcatgaaacaagcgatctccgcggatgttgactacagatgtgaatggaacgcggacatattttcccgtaggagggatcccggggattctaggcagatgtcaattaattgctcagctgagccacaggaaccaatcacccacatccagtccatctgcttcacatgagtgaacacaaagataaattcgtccacaattcggtccgtgcctactgtccgactaataagctccaaagctgtgtcgtcggggttgttaaagatgaaatgattgagataaaaatggcttaaacgagctcgtccaatgcctcctgtcagcgttggcacatgattcacgtaaggctctgagaccatcgtcgccattgtcttttcgaccgagcgtgcttcgaattcataataggtgtgctcgtcccagatcttctcgaggtcaaagaacgggccacccgtgtgttttttgacaaatccgacaacccgcgtatgagctactcctgctgtcgatatgttgaaatccggatggcctgggatcatgaagctaggagagcatacatcggagtatatgtgtatagtctgtccttccttcttctcgacttccattggaccagatagctggaaaatggttgactgaaagaagggaatgtgccaagagtcgaagaataccgcggcgatcagagccgtgccttgaaccagtgcaccttggagactttcctcgaattgaggagcataatctttctttgatccataaactggtttgtgtcagtggaggctagtgaaagggccgggttgacacttcgtacctatcaacccaaccttttccttcgtatcacactcgggcctctctgctaagccacactcagcttcttgaagaagctcccgcagagatgatatgttaatagcagacttttcgtccacagtaatctgtgccactgtaaagctttcctccgcccattttttgaggggttctggatcaagcgtcttgttctgctgctggcatgtcgcgtaacaaagaggtcgtatgagaaccagtcctggaccgtgtccacagcgggaaagaggaggatgaatggtcacatatggactcaagtccactggagcggaagataaacttgactcggtcatttcgcactcagaagttggaagttgagcaaatgggggtctccaagtggccggccgatcgttatatgtaccggcctgtcacccccactagtgaggataaggatacaaatcagctatgcaagagatacgctctcaatacgcttgatcggtcagatactcatcatgtaattttgcaatcatcgcatttatctcagagctactatccacgtgacctgtcatcctcggcccgttcatttctacgcgcaagctgtcgctctcccaagagcacaacccaacaatgaacgcacttgttcagtctgcgctgactgatgttgaatctaaactcaatgttcttctgaccagccttacaacctctcccactgctgcaggagcccccgcagcagctatcgccctgctcgatgcggacgatgcgctaacctgcaccattgaaacgcttcgacagcaccaagaaaaccacgcgaatatccttcgactgcgaaacgaggcacaacaattggaggaccgagtcaagggtatcgtgggggatattgaaagcttcgagaaagagatccggactgcttgtggagacaacggcgacagcgacagcgatttcgattccgacgacgacgacgaccttggcggaaagaaatcattactacggggaatcaaggagattgactacaggttactcttggatttcgcacgtcgcatcagcaaatacaaccacgaagcagcagccgatgcagcaacaggcgttgtgaaacgtcaggaacaaggaaatactcccgccgacaaagatgtgacaatgacgggaacaaatggagaacaaccaacagaggaggacgcagagccagtggcatctgtcactaaaaacgcaacgcagtggttggacgagtccgccaatgttacgcgccaggtctacatgctgccctacccgatggaggaacggatacggatgggattaatgggtcaaatccagctttctgctggtgacgatcccgaaaaggaggtggaacggttattgcgcgaagctgaaggtcttggggctgcagaacccccggcacctgtggaacccgccgaaagcacaaagcaggcgggcgaggctgcgaaggctgcagctcaggccggatcatcagctactggaatgccgcgggcgcatgccccagcaccagcaccgaaaccaaagcccaaggcgatgctggaccttgatctctacgaccccgacgaagatgacgattgagtgttttaaagcgggcgttgcattcgattttcataatgataccagctaaacagcaaaaagccattcaaactttttatttttattttttttagccgtgtctcattccacattttgtctgcctcggggcgtttgatccagcttacgagccgaagacttggccgtccatcccccggaatctcttattgcgcagcgaagcgaagcaattaaatcataaactcgtgtagttgttacgtggcggttgtttccccttcgaggacagtctgcaaggtgcactagttcataccataatgagtaactagcactcgtattgaaaagagagtgccaagaaaagatcttacctaattaggttagaccactgtgccaacagtaaaatcgcttcagttctccgattctaaattgatctcactctacaatctattcccatttttgatttcccttgacccaattagacgacaaaagatactcccacaagatataaaaaattagtagtactagtttagttcctacatctacaaggccgaggaaaagaacctgccctggtcaatcgaaagtagtaaaccatggagaaaatttgatgttgaatatcagatcttttcttattttcatagtcgtccatgattactgttgagcaaggcattcaagttgatcggttatcccgtgaaagaagcacactggcactactgtaatatgaattatctatctccatctctctgaagataggagactcgcaatacgagtaaggctacaacggttttgacgatgaatttaacgtgattcccgagtgcaagctacaagttctctgatattatactagaggatcatggtctccttcaatgtacgtcacactttgtggctcatatgcactggtcattcagtattcataaaaaatcttccagatcccaaatgagtttagtagtgtgggtgccatggctttggtatctatattagtcctcggcggtggataggcaagtttattctgaactcaaagggtcctctactcttttcaaagtataagactagaatagttccttccaacaagagattctctgttctctttaccagaccagattttctaagaactgttttattatctccgacaatgtctaaattacctaacaatagtcctccgcaatacgaatcacaccatcaaagccaagataatatacttatcactgtcattcagaatgaaagatgcttccgggaatgggcgcgaaaattgcgggatcttgatcctagattcgagaagttcttcgatagctcatttcaaggcgacttgagatgcccaaaatgtttggagtatgtacttcaagggggccgactacttgatgaaatgacagacttattcagagaggctacgaacatactccaggaaagaacatcacacggccagaatgagctctatgatgccataaaaaagctttctgataccgagcttgatcgcgtctttgcttcttcaaagttgggcacaacatcgcataggcaacctaagctgacttggaaccacaaaaacaatatagacggccatgggaacttcaaatacaagtcatcgagggcacggatgtttttccacgctatccagggggtatgggaacatctcaagggcccgctagtctgagactcttgggatcgacagcttcctgcgagtcgcttttgtttctctaggatggtcctgacggggcattataaagaggagaaaatagcatattggtgtttgcttctgtgatatgttttatgtttctttataccaataccaaacctttacactttggtatatatttcaccgtattctacaatagcgagaaagaggtttgacgttgttcattacccttgctgaattgctagtaatataatccatcggatatgaagtagttgcaatcttgactaagtccttgatatcttactaggcaccgtatatgctacttatcatgccacaaatgtaaatgactacaagactcacctttcatgtaaatacagaacctaccttcgagataagaaacgtttacagcgaacggtgagatctacggattagcacgagaagaaaagccacgcaagcacacatagcaaggatgcgatatataatgaaataagaatacagaagaaaaaaaaaaaaacaaggagcaaaataagaatacaagaaaaactaaagatacaaacaaagtacacaaaaaaactttgtttgtcacatatcctgttttcccttcatctcacctcgctggggttctcggggagaagcaaaactggtgaaacgcccagaggaacgccttggtgccagaggggctcgctcccacccgaattagcgcttgacccagcgttcaaggccccgggcagcacggccagattgctggacggtggtaacagtggcctaggcttcggcggccagggggcgagacagagaagggcccaacggagtgggcctgcagaatttgctatcacaatagctttcatgtcagtaccaatactatctccgcccggactatctcccgccaacgcctgcgctggtgatcagttcgagcttatcgagtgacgaagccttctccaaaaaatctgagaagggcgattgcaggagagcctcatgacgatcctgagaagaaggcctattcatgttcgcagtcgcgatctttggtgtaaggatgaagtgggagatattatgacataagagcgcgggcggaggggatcactagttaactaggctagttagttggttactcgagcagtttctcaagtggttgctcaagtagttactaaagtagttgacgataaagcagttaatattcatatgacaaaagggacttgattttatcagtggtttacatacaaattataggtacctactgccatactactaccatatggcaggaaatatgcctaattgtgaacgcggtactgaaattacaggcagggggagaataagccagtaagagggggcctttgcgtagcattaaaagttggaatcagtcgcttcgctctgcaacgacaatctagagaccttgggccgtcaagattactagtaattagtcgatatgccactgtctatcccgtcggaggattagacctgttaattccagaggacaagttttgtgtcactggtggctccaccgcagaatatactttggcaggcagggttgcctcttcagtctatagtttgacaaataaccgcttttcagtatctaaggtggcttcgtgagccattagaattcaggctaaggacagaacagggctaggaattgctgataattattgatataaaatcaagcatgcaaggtagttcatgtgcaaggcgattttgatagtgaatagccactctattttctaaaatttacctttgccttatatactatcagaaaggcatatcatctcaataactcgctcgcatggctcagtggtagagcgcgtcactcgtagattcaatctggaaatgatgagatccccggttcaatcccgggtgtgagcatatttatttatttttttcgtcttcttcggacaatttgctttataaagccaaatgtgcaggagtttttcactaattagctcgcatggcttagtggtaaagcgcatgactagtactaagtctatcatgagatcctcggttcgactccgagtgtgagcattttttgcctttatttaatctccatctttacatcaaggattgcttcatataagcaaagttttaaaaggttttcattaatcagctcgcatggcttagtggtaaagcgcatgactagtatgaaaagctatcatgagatcctcggttcgactccgagtgtgagcattttttttgcctttgtttgagctttttgactgagtgttttgcggtttcgtgtgagctgctttcaacctttttgagttgtgctttccattatggtagtaggcttatatagacaaaggtgtgtaagttttccaccaatcagctcgcatggcttagtggtaaagcgcatgactagtatgaaaagctatcatgagatcctcggttcgactccgagtgtgagcattttttttgcctttgtttgagctttttgactgagtgttttgcggtttcgtgtgagctgctttcaacctttttgagttgtgctttccattatggtagtaggcttatatagacaaaggtgtgtaagttttccaccaatcagctcgcatggcttagtggtaaagcgcatgactagtatgaaaagctatcatgagatcctcggttcgactccgagtgtgagcattttttgctttttttttataaactccctagtggttgagaattgcggccagcggtggacatacctaaagtagctacagagtagcgagtgtcgatagaatgtgcccgtggtgccgtcctgctctcctcaccgcccttttgtcaaattcgcatgtacctaagcaagacggcaggtacctgcgctttgtatgtaaatcactgacaaatataagtcactattatcacctcttattctatctcaccaacgtcaactgaaaagagataggaatcaggcagatttcgcaatttgttactcaatttgttactacataaccaactaataaggcagaaaataataatacccgatcgcgaaggcgatactttaaatttagcgcttgccacggttaccgcgttatcaaacttatcacagtaggtacatgtacgaagacgtttttagcagtttctgaaacttgttctcctttttaagttaataactcttaatacttataattggtctaacttttccgagtcgaagtttaccatatgtatccgtcataagtgaatccctatcaaaaggttcttttgtatttccaggcttttaacaagaatggagttatataaacatatacacaaatatggaaaaggcttccaccaatcagctcgcatggcttagtggtaaagcgcatgactagtacgaagtctatcatgagatcctcggttcgactccgagtgtgagcatttttttttaactttttggcttgcgcagccttgaagcttttaaacacaaagtcagagagcaagagacgcatttacagcaggcgaacattactgggctatcgaatgtcgagagcggagattgatggatggatggccttaagaaaagaaaatccagtcaaacaggaccaataaaaggacagtcagggctaaatccgtgaaatagaactatacacaggcagagtgcatgacctagccagttctcctgcaacaagtgagcctagaggcgtaaatatgcatggtgacgaaactaatcgggacgcataagacagaccccggggctatgagtgtcttgtatttggggtgcattgaagtcccaggcttgagcactcgcgctctcaaccgccttctgtaggtggaccatgtgactatctatatgtagtagtgttttgagactatagatgcgtagctgaggccaccctgttactacaaactttctacctctctccacaaatctttatcccggcttcgccatcaaacttgtcccgttgttacacttattaggaatatgtagtagtaccgcaccggaggatgctccggaccagttcacctattatctctttcgcttcaaaaggctcaacttggacccaaacatgtctgcgtatgtcggattataattgcggcctgtcggctgggcccttatccttaatcccccacagtgtggaggaagaaatcgatgagcccaatgatgttcgatcgagtcatgatccccggatgtcacctccacaccacgaaacacgcgaacaaagcttggtcgagccagactgtgatagtcacccggaccaatcggaaacaacgatgctttacctatagagtcgatgtaatggaatcttggcacttatctggacaaccccaaaaagcatttaattaggctccggggtcccggtttatgcctggtgtccagaatggcggttctggtcattttgggttctattctgctcagagctcttgaattgcttttttcagatacatcactacaatgagtcactacgaacacccttccttcgatcaagatcagccagatggagatgtggagaagcaggatgacagtgatggagtctgttctgctgggggcactcgtaaggccagccgagcgcaagggagtgcaggtggacgggttagtggagatgaaagagatgagttaaaagaatgggagtgctacgacaagctagggtattccttttcctggtggaaaaaatggactatcatctccgtcatctttgctgtccaaacgtccatgaacttcaatgccagtttctatgccagcagcatcagtctgtacgcgacacacttcaatatctcagagcaggccgcacgtgttggtcagatgggatttctcgttgcttatgcatttggttgcgagttttgggcgcccttcagcgaagagtttggtcgatggccaataatgcagctcagcttgttcttcgtcaatatctggcagatcccctgcgctctggcccctaatttcggcactattgttatctgccgcattctcgggggtctatcctctgccggtggttctgtaactctcgggatggtagcagatatgtgggagccaggtgaccaacaatatgccgtggccttcattgtgctatcatccgtgacaggctcggtcattgccccagtcgtcggaggctttgtggcaaccttccttgactggcattggaatttctggatccagctgatccttggaggcttcgtgcagatattgcacttcttcgttccagagaccaggtgcagcatcctcgtcaccagagaggctaggcgaagacggaaagatggggatatggtatggagtggtgacgagctgaagcaaactcgtatgtccttccgctgggtcttcatggtttgggtccgcccatttattatgttcgcgcgggagcctatcgtcttgttcctctctctcctcagcggtttcagcgattctctcatcttcactttcctccaatcgtatacgccggtatacaagcaatggcacttcaatacgattacaactggacttgctttcctcccgtgagtacccacaaccttgaatttagactaattctgataatctgatcatacagacttttggtgggctatctcattgcctatgtttcattcattccatggatttatcgggattgtaagaaacgagagagagacccagatgctcttcagccagaagctcgtctttattggttgctatatggtacgtattctcaaatctggttcattggtctcatcactcactcgtaacagtggctcctctgttgacaattggtctatttggatttgcgtggactagtctcggtccacctcatgtccattggattgcgcctatgatcttctcagccttgatagccattgctaatgtaagtcatgaaaactcttaccccacgatacaagactgacaagttattctgtgatcaagtatgctatttacatggccacaattgactacatgattgcctcgtatggtccatatgctgcctcagccacgggagggaatggaatggcgcgtgatttcctggctggtattgcagcgatgtattcagtgcccagtaagtgaccataattcctacaacggaatatccactgaccacaaatacagtgtatacaaacatgggtacaacgcatcaccttgaatggccttctactttcttgggcttcatggcaattctcttcaccattccaatatacgtgttctattgggaaggtcctaggattcgagatatgtcaccattcgcgcagaccttggcttctgacagaaagaaggctggccgcagggtttcttcttgtggttccggtgatccagatcccgttgaaaggtatctgtctgaacggtcatcacaagcgaccagaaccagatccggttgaaaggtatctgacatgttcctcgaaataattctatgtctctagcttgctgtggtttgggctgagatttgcatcagaacggcggaaagaaagagtatgaaatcactgacacaggatataattggtttcattgatttctatcttaaaagcttctctttggtgacatttttcgtgctgatcttcgtttctgttgcgttggccttcatcactgcactgctaaactgggaaatatttttgtattatttttgttttgatataatgttacaatggactttattctgggatatacttgctgtcgcacacttacgcttgatgcaagaatgccatcatcccatcatgccctagagtaggggcgattaagtatgtcaccagggcataaatttctcattggatataagccagcgtaattagtatggtatccttagtatattactgcacttcaaaattactacctggcaacattaactagtgagagggttatggcttatgactgcccaatggcatatagtcgcccgtactagagtcatgtcatagctaattcggaaataattcccgatgcagcaccagcagcgatatttactttgtccacaagggtgtttgaaattaaatatagggtatagacgtttagatacagtacagttgatggctcgcaatgtagaaacggaaatcaagtaaaatcattgattccaagaatcctggagttttcgaatggcatattcagtagtccaacccaaatcagcttcgacgccccgtagcagatcaacaataatctgatgttcctcgggattttcaagacactgcccgacagcgacgagaagcgggaccatgaatatgcgaactccaccctgggggcgacccaatgcaatgccgctgacttcacgggcacggaattcgacctctttcgtgacctcccggtacccttgtaagcggtcaaaggctgtggacggtgcactgatcacatctgccggacgattgagcaataatgcgatgcgcccgaaatggtaatgttgcatggcaacagcacaggttgtcaagccatggaatatttcagggaacgacaagtaactcccttcggcagtctttgataaatccttggggcgttcgatccgcacagaagaacggaacgtttctggcacattttcaaaccatgtttgaaattcgaaagatattttgagccaggtatctgtgtccggatacggcagttgggtggcgtttgttgttgtgccttcgggtgaggctgccggcggagatcctgtccactgcgcaagctgtaattgtttagacctggcgaggaagttgatgactttcgtgacaagccagattaacccgttagcagcctgatcttcctgcgatagagttgacccgttccggataatatggaaggatttctggtcgttgattgaaattcctgctgcccgccagaggggcaggttctctgggtcgaaatgtgtaggtgagcgggtaaaataagaaccgagatagtcttggcgggcgaaattccagaaggcagcccgaataccatgagaaaacagggcggatgatgccgaatgtaaactgagaagtgactcaaacaaagggccaatgcgagcaagttgcctggggtctaatgttagtaatagaacagcaactgctaacaagcatctcttacatgtgccattcgtccccgggcatatctaaaagcctatacatggtaagaagcgtagcagacgccaacagctcctctgtctttcgaatgatcgccatgtcgtttggatcttcactcgcgggcttcatggtcgcttgagtctgacgggagctgatccatcgaccaacgatctcaaagggggattccaagatggctgagctagacacagtggtatagccatcggacgtgaggttattcagatccgaagctcctaggtaatagtaattggcagctttgaggaaccagtcaacttgagttgcgtttggataagtttctgtagtcgcagggctcgtgaacattccacccgtggaagccttgacccctttcaagcgagctaggtgtttggctgctagcgctgcaatagcgtacttcacggacagattgctgatggctcgaataggaacatgaacggtaaagaatttttgagaatcggacaaatctagcctattgtattatcaatacgctgcacacgccaagggaaatgtcagtaatacgaaccatggacctatgacctccgagtaatgtcgagtgaggaacgcgatctcgtgttcagttccagtcatgagctccgagaaaatatcctggaattcatctttttcacttcgatgtgatgagctttcggagatgaccctttggtaatcggggcccttatgtggaattggggtgtaggtgttatcaaatgttgggaaacctcctgcggccgcagttggtgagattgacttatatattgtgtttcttgaagattcgctgccttcctcgatgccagagatggagttgtgaatagagatagctgggctttctggggcatgcattgttgtttgctggatactccccatagcaacctctgggcggttagaaggaccaggcatttctactatcatggagtcatctctcgagtccatctgaaaatgaagagccggattatcttgctcctgaggttggttccattgcaaggtctgctcattaggtcctacttgtgagctttttggctgtgtcgggtctgatatcagctctgcggggacgtatcacaaagcatgagtgcttaggcagttggcagtttgacctactttgtttgaattgaatgcagagtttggccttgaatgaggctcctgatatggagcatagcggcgccttactgtggctccctgatcgatgaatttgcgggtctgaacataccccgggcattctacccccgcggtggtgcaccgctgacaatgagggcgagtctcatcacactgccccaagttagcgaaaatctgcacatccaagttcaagaagtcgaactaactttgagatgcctctttttgcaacgctcgcatgccttgttagatggcaccccaggcattgtgggttgcgtgccagtatcgcgatttccagggcttaatgctcagttttcgaggtcatgggagaagctctgcgttgcgtcgttataacacatacagctacttcacatttcgaaaatacatcaggcgaggacgcaatcccagggcaacaaatctagaatgaatgatgcaaggtgcggccaaggcccgcgggctgaaggggggatgacataatatcccgggaatttctcgcttggaactcggaatttggcgacctttttcccttgtacatcctgtcgtcacttgcttcttttctacaaaaaaatcatacaccatgttgcgaacaccgtcaattctcgttgatagacaatatgacacatcttccccattgatccggtatattgaaggccacgatcggatacgttggggctcaatatcttcaacacagccggttctttcaggaccagaacaaatccgcgtatatcgcgaatggattggtgtgtcaccatatcaaattgactagtgaatctggtaactaattctgcagatgctgggagacctcataatatagtatgttgggagtgccgtctccccgacagtctgattggttgccagacctgctgtaggtcctaccatacagcatgtttaatggatgtggttcgctctgcaaataacttccattgtccatcttgccgggcaagagcttgggatcgtacaccacctcagttccccgtgccatctccaaccccaagcactggagggaccccaaacagccattcagacacgtcatctgtaaacatttcaattcgtcgcgatagatcgccaacagcatcacggggtaaatcctcaacggcctcggggatgatgcatccccctactttgaaccgtattgatgaagtcaatgctcgcggtacgccaactgaggtatatcctattgcagagatgtaccctcggcttctggaatatctagcgttaccagatgctgagacagatcgccatgcccaatcgtcacagttcaagcatcaactgggaatggctatgaaagaaattgaatcatatcgggcatcgatgcgagacaagacgaacatccgagaggactattcacgattacagcgcgagaatgcacaaatcaaagcgtatcttgattccagggactcaccgcgagagtctagtattcccagcccttcgacagttccacacagcatcatctcaaaaccggtgtctgaacaaagggtgaaggcttgggacagccttgctattgacatgttttgactgttcgtgtctggctgcacgaagcattttgacgtatactcaacgaggaagttgaagtagtgatgaagagttacaactgcagcaaaagaacaagcattgaatgtcctgaaccctcgattcacccaacacgatcactttcaatggtctcgatatttgccgaacatcttttttcgacgttctagatgcatgttggaaaccgtgcatttcgccgaaaagttcccgaccggtcgtaatttgatcatgtcaccgtcacgctctccatttttgatataatggcgcggagaaggttacatgaagtgaaattgctctcgaaatggacgaatcaacctctggagagactgcgttccccgcatctcggggcaattggcgtcccctcaacctcaacgatcgacaagtcaggaacccggtcattgtggaactcggtcattatcaagtttcttattggatttttcaaccgtcttctctccgtatcttcgggttttcgctccttgacctcttcccaggcggggaatgagcgtggcagggtgtattctgggaccagatacggcagatgtgacaccatttcggtcgagcgtcgatgcaacatccactggggaattgctcccgcatttcattttggcctaagtgcaaggaaccaaggaggtgactggcagtttcctaatttttcctcatttccctcgaagggtacttcgcatgccgatctggcccggaatgcttcccccgcgacttattgccaattcctataaggagcttgaattccgtggaacgcgtcttttctacgtctgaattgtaacctggacagcttttggattattcttgtgtatggctgtagatagtctctggatccattatgctatcacagcatcactccctccacatgtgcatcttcaatggcatcgtaacagccctatatgcatccaacgtgatcgccgcaaagcattcttcggatgactttgacgtcttgaaatatgtcgatcctttgattggcaccgcgaatggaggtttgtcttgaatatgacgagcatttttgtcagcaaaggctgacaattcttacaggccatgtatttgcgggtgcgactttgccatttggtaattcatacgataccctttgttttcatttaacatggctaacaaacgcaggtatggccaaagcggtggcggacactgcaggcgagaatcaagctggttttgcttacgatacggaggttgtgaccggattctcacacatgcatgattctgggactggtggtgtaagttttttgtagactctcggagaatatgccctgtatctgactgatttcacagtccccgtcaatgggaaatttccccatcttcgctcaaggaaattgcccgcatgacgatattaaccagtgcaaatggcaaaaatcggacagagcagctgtctgggacaaagagtctcctgaagttcgtccaggatacttcagcatatcattggcgaatggggtccatgcggaaatgacagccacaaatcgatctgctctatatcggttcacgttcaatgaaacctccagccagtcgctcagtccagtgattcttctggatttgatggatttacctcaatctcgaacaagtggaagtgccgacgtggacagatcgactgggcgtctcacgggaagtggcactttcagcccgagctttggtattggcagttacaagtcatatgtttgcgttgatttcaaaggagcagagcttcgtgatacaggcatctgggagaaaaaccaagcaaacatcagcagtcggtcgctgacactcgggtctgacacatcatccactctctcggctggtacatttgccagattccacgcccccaaagacagcagtattctcgctcgcgttggcgttagcttcataagtgttcaacaggcctgtgagaatgcggagcgagagctacccgactttgacttcgaaggtaccgtttccgctgctgaatctgcttggcgaaagaaattggatgtcgtctccgtggatgcagatggagttttaccagatttacaaacagtcttctggagtggagcataccgagcactcatcagcccgcaagactatactggcgagaaccctctttgggaaagtgacgagccatattatgacagctactattggtgagcaatccccgattcgaaacagatgactagcatgctaatgatacgcccagtatatgggattctttccgcagcattcatccactgctgaccctggttgatcctttctcacaatcccttatgatacgcagcttgatcgatacctatagacatgaagggtatctgcctgattgtcgcatgtcgctttgcaagggattcacacagggcgggtccaacgcagatgtggttatggcagatgcgtatcttaaaaaggttccaggcattgactgggacactgcatatgaagctgttgtcaaggatgcagaggtagagccccaaaattgggatgtggaaggccgcggtggcttgcggagttggaaaaatctcggctatattccttttgatgactatgaccctgatggcgaaggtacgcacacgcggagtatatcacggacggtggaatatgcctacaacgacttttgcattgccgagatggcacagggcatgggccaccagtccgactatgagaaatatacgaaacggtctggaaactgggtccacatgttcaaacccgaccaaaagtcaagcatcaagggggttgataccaacttcaccggattcctacaacctcgatacacgaacggcacatggcgctaccaggacccgatcttgtgtagtcctctcttagacttcaccggatgttacctcaatcccgatggccatgagacttatgaaggtagtgcgtggatgtataccttgtgggtgctcacttgtattttatacttcttgaactcgaaactaacgctttacttacagctatgccccccacgacatgggcgctcttatcaagacacttggcggtgccgaatccttcacctctcgactaagctatctccatgactctggtttgctctacgtgggagatgaacaagccttcctacccgtatatcaattccactactcgggacggccaggtctctcggcaaagcagagccatttctacattccatcccaattcaacacaacagtcaatggtatcgccggtaacgacgatagcggagctatgggatcatttgttgtcctgagcatgatgggcatctggccagtgccgggtcaggacgtttacctgatcactccgccctatttcaaagaagtcagcattcgaaacgccctcactggaaaggtcgcgactatccgcaacatcaatttcgatcctagttacaagtccatctatatccagagtgccaagtggaatgacaaaccgtggacaaagaattggattacccatgactttttcgctgagggtggtgttcttgaacttgagctgggacccaaggaaagtgaatggggaactcagattcaggatctcccgccgagtttgagcgattatcaatgaatagtcgatctgaggagcaactgtggtgagagagtggcatttcgagattgttggcctctctgataagcaggttacttttatcagtatattttatcagtatattcacgacttgacactatgaactatatctctttttgatgtcttttatactgctttttgaaagattttgatactatcattggaagactgtataaaccatactgcatcttcagcataactagtacttgtaaagtaagagtggatatgaaataatactacctggcaatgttgactaatgagagtcatacttagtcgtcatcgtaattcgctgaacctaaggcaaagtgtatcctccatcaataatgaggtttgcacctgtcatatagctagacgcatctgaagcgcagaacacgtaggcctagataagattgtcaattggtttctagggaactagatttgtggaatcgtacccccttcaactcataagattcggccattctcttggcggggatcaagtctagccacttgtcgcgccattctttggggaaggtgaacagaatttcggtagcgatgtatccaggggagatgcaattgactcggcagtagtcaacccactcgacagacaagcacttggcgagctgaacaactcctgccttagacgcattgtactatgcgaggattagcgacatgaaaaaggagtctttccaatagagaacataccgccgattgcttctgtggaagattgaccagagtcgcgctggcagaggccgtgaatataacatttccatgaccctgtgacttgaagatccggccggcagcttgggcagaatagaaagcaccatcaagattgaccttcatgatctcgtgccattgatcgggggtgtagtcttcggcggcagtgttcgaggcaatcccagagttgacgaccatgatatcaagcttcccgaaatccttcgcgacctgctgcacaaccgcctcgatctcagactggacggcaacattggctttatacgctgctgcgcgtacgttgttagtagatgcaatctcggatgcgactgcatcagcggcatcgaatgtgtaatagatcaaggcgacctttgcactttgttagtttgattgttttgtagcatcaggtactccgtagtgtgacttgcatttgcacccgcttcggccaacgctctcgagacttcaagaccaattccacgggcgcctcctgtaatgaagtgttattcgagagacctttataattgggagctaccgtaccagtcacaactgcgaccttgcccgtgaggtcgaatgccttcataacatgctggtttgggggttgtgcgagaaccattatgtcgtattggctgttgcccgcactcgagataataggataaactcaatcgaagattaacagagaagggaggagctgagtctgaaatgtccctcttaatccccgcatctgttcagctctgacgtgtctccaaccattgtggcttcctcctgcagctaaatccagtctaaccctgttgaaggtaattcctggcgaaagcgactagacgctgatgattggaacgccctgtctcactcgatgtccactgagacttttatttttttcgatgttttcggttgttggttcactttctcgttgttctgatttgaaccgtttgcacagctgggtgacgtggttgggtgagaggcattgagatgtcgattcagtttcttgagtcccttgaacaactgcttgttctctctgttgagctcataagcccagaggagagtgagggcttcgtttgactttgtattttccattgtcgaagatggggctcggagaggtggagaggaagagaaggggagctgaggactaagaaagggaaaaggaacaaagacactagaacttcctagaagaatacaaagccatcgattaattaattattattcttctagtgaatttactgacttcaaataattaggtctctactttatctccatttcatagagtatagcaaaaaaaaagaggtgctagacttcatgtgctttgtatctgatcaaatatcaagaagacaccgaatgctcaaagatgttgttcggtttctctccttaatcactcatcgtgtcacattcgtcctcggaatcgacttcggtctgcttggtctgagccttgcagtcatcatccttgtccttgatcgctcgagtatcgtcatcactcctggtggaagcttccatttcatcaagcttctttctcaggcgatctagtctcattctagcagcatggttcgtgatgccaaagtgtctagcgacggctggggcatcaacctgtaagttgatattgttagaattcatggccagatgttcaagtgaggccgaacaaaagaaaataccaacctgaacacctgagatcttatggcaggcccacaggaacaagagctgctttttcaaatcggaatctctaggttcctttggcttggatgggctttttccagcctttgaggctggggttgatttagttggagccatttgaaagtgtaataaccaggtatgagctctttgagtgtgataagtgaagttgtgggagaatagataatagtagtgaagtcgagaatgaacaaggagaggaagtgagagagagatcgagtaggaacctttatattggcatcaatagcaaacaactaagaaagcatgtctctctcaacttacatggataagtacaaacagaaggaaagtacatttagacactttgatcctctataatatatacattattctatcaaattggggtatatgaccataaaaacagaaaaagtcatttgaaaacgctcaggtgaagaatcaaatgccctttgtctttatagactcgaggttcttgactggatgtagaaagataggaggaaggcagagtcgagggttgttcttctcccactgcacacgattagtatcagaatatgtcaagacaagagcaagaactcacctctttggcaccgtcatagcccaaccaggctctgtatagcttctccgaaaactcggagttgaacataaacgtcgtattgtatataatattatcgtgctgaccccagctccagatgctgtcgagcccagcgttgaccttgccaggttctcccgggttgacatgacggttcaactcctcaggatcccatttggcatcatggtaaatcggttgaggaatctggaccgctttcaagccatagtacagagcccaggatataggagacatctcggacgcgagaccaaccccggacttcaccttatccttatgcaacatgccgagaagtcgcgccgagatgcgagacattgctacaacagcggcccagcgtggggtctcttggtcttgagggaaattgaagacacggtcacggaaaggccagtctgtaccaactgggttgaaatgaggcagccaggtgatcagatcggcttcctcacccacaccccagctccctggctcatcttttgggtatggtacaggggggataatagcttgcccttcgatgtcgattccttccgcgggatgagggccccaaacactgctgttgtcatggccaggcatttcctgatccaccttcttcacaaactcttcccaggtgccatgaacagcaggcatatagaagtgagagttgcgctcccacagatacttgcgtggctgctgtttcgcaaactctgttgccttgtgcaaaaggtcgtacatatggccggtataccgcgagtccatctcgaactgccacacgtagtcatactgagggtgtagtcgtgagaagatctgtgtgggctggaaatactgcagtatagctctaatagggtgtcagtaggggcatgtctagctctgaagggccaacacatacacatgaacatcaatcccaggataccagtcattcaacatttcctcgttaaaccataccgccaggctgcgcagttcctgcggcaaatgttttgccttgaatgccttccaggcggcataatcggtctcttcgggcaatttctcgccctggcagtcgatcaggagaataagctcatattctgcacctgagtagagtgacaactccatcagcatggatcgaatgtgatacaagtcattctcggtgtatttcatgccgatccaagagcgcaatatcacggctgtccgggggacggtcttgtctgtttcattcaggtcctcgcgaggctgcacatccgaatctaatgatttgtaaagagcgagtatcttcccttcggatggttgcgtgcgatagcgaatactattgcgctgcagacaatcattttgcaaattggcccagtccacctgctcccagtttatttcagcggcctcgttggaaccgaatgtaccattccaattgtgggttcgagtggtcttgccctcgaggaaaccatatgcaccatatcgggagtagcgatcggcgcagagactgttgttcaaattccacgactcatacgatccaaaagtgggagttgggaaatctatttgacgattagttccccgtcggctcttcaaatcttcctcttcgcacctgaagtattccagcgaaacccgctcatcatcatatcttcatctttgcggctcaggagtcgtccttggggcccaatacacggctggtacgatccctttgacgtcgatttccattccgcactatcatagtgtggataggggtcattgattaattgggccgaaattcgagattgagtggcgtaagcgctcgggaacggatcaacgggttgttctgtagggctgatacagatcagaatggaccaagggagacgagaaaagagggatcttcaattactttgatagcttcacacgcaacggaactactagagcttctctggaatagggaacaataaaaaacaccaggcacagggcggcgatagcgaagcagcgccttggagaaccgaaaaacttccgcagcgccacgaagaaatccattagaatgtgcaaaatctacaaagatgcaaaacattaatctgggagccttgcaagttttgtagctcttgagaatcccccagggctagtggcttggctcggcttatgggttctatcgtgtgtgttgggccaatcgtagagagagaccaacgcgtgtagaccgacagactccgagccaagagaataatgagcagtgtaaaggacagtagagatcattcctatgttacattctttggtctcaattcatgcccttcaaggtgtttccataaattaatgaccttaccttgaccggcgtgacatctcggatcccgccggatctgcttatgttgatcttcgtagccctaattttatgtgctcgtactcgtactcgtcttaatagggatagtgatcgctaggcacatccatatgtactcaaatactaaactaacaagatcgataaaaaccatagctccaatatcagcccacttgacatatgaaaaaaaaaaagaaaaacgcatatatcaaacaggcattccaatatgcttacacgtatcgcatctcttccaaaatcatggggtttgatgtcagtcagtcgcagttcgccgaccccatccactgaagaaccccccaccagtgttattgggtggggcattggccaagctgatccgcgactgcgatactccaacaaaggaatggcgggtttcaataatatttaccccctgggaggtcttgagcattctccgcaatgaatcgtacttgccttttacttcctcaagctcttgccgagcaactgcctcggccgtcttggcagtaaccaactccatcagcaacgtctcttcggcggcaggtctgttattctccgtcgacaaaacggtctggagacccaggctgcttgtccgtctgttatatgtggggctttttgtggagctggtgcgggagagcttgaactcgcgcagaccactagtgggagattgagactcgccagactcaatcgcagaatacgttgtgtctagcggcgtttccgatataggagttttgaggatccgcagctcccggttcatacgctcgagccgctgtcgctcccgatacccgtcttgaatccggccccgagcttctcgtaattgctctttgagggacgagttctcctgttcaaaatcgtcgatgcgccgggtgaggttcaagcaacgaccggcttccacctcgtgcatttccttccatcgagcaacatcgtcattgagctggagcttggtctgggtgattgaaatacgcttcggttggacggattcaaaacgtgcttcggctttcgttactaactcggccggttgtgtctcagccggctgttctctaatttgattcaacatctccttggccagggtgtggtcttcctctcgctcttctctctcctgttgcagttcacgtgtgaggttagcttgttggcgttgaagatcgctgagggccatcagaagttcttcaatctgggtatggaggtcgcggtctttgtgatgtgaagacatggtggatttcgcgcgcggtttttgattatcgacgctagctacaggcgctgatagttcggtcgcagcagtacttgcgtccgacgtagtttcaatagagttgagagtggaagtcaggctctgcttggaggtagagcgacgaatgttctgacttgacgggctactattcggactgagtgacttgaccgaattgtgggagtttgatgagccagcccataaccgcccaaggaagccagatgccgttgcctgcatctgcggaaaggagggtccggagggtgagcctttcgattggttatagctggcttcaagcttttggagactttcattcgtcacgagagaggtgagagacacgaagtcattgacgagatcatcagcattgaaggcgtatctgaatatcacgggttagccgagttctttgtttagaagatgtgctttgtgcaatgtccaaaacttacgtgtcccacaagcttcgagataataatagttgcatcacatcctcgaattcgctgcaagccaaaattctcttttcgttgcgttgcatcagagaaagcgcaactcgcatcaaagtctcgcatgcgccttccaaaaagataacatcataaattcggagaagcatagggagcggacaagccaccgcaaagaatgagaggaaccactgcgatacgtagaccggctcaacgtgcagtgcttcgagatgttggaacaggaccggcctgtgccgtgccaaaagattttggaattgataaacatgaaggtgaagacccgaaagatctggaagatagcaacttcgcaggttatagtgatccatgaggctacaatatgttattagtacttctccaagtcatatcatcgcccaaggagacttaccggacaagaacacaaaaggcctccgcatctgtcatgtgcatgagcagggggcccaccacgaatccaagaccttgacagtagccaatcttagtatcgtacagactaaaacatcgcaatacacggccgagcatttgttgaccctcgccgttcgggtcgcgaaacattgcaacattgggaaagctgcgaccaatatcttttccgatcagcccgtcgtacggactgctttcgcccgaaagcctttggaattcattcaatagatgaggatcgcgtgcgcccgctaggctaggccacacaactcctcgcaatggcggaggaacacccccttggatcttattcgaggtcaatgtcggcaaacgctgggcagtccggtggtaatcggcaaccagtgcagcccaaaactccaactcggtcattggaggagggggtaactgcgagtatcgcagctctgcccgagcgggatcccgaatgagtcgcttgatatggtgtagtgactcggagcgggactgccgctggtatttgtcatgaggaacctcggatatccccgatttggggttggtcaccaacgcattgttttcttgttcgagtcgagcgaggagcagggctgtggactaaaattaggccaagaatgttagcactcattctagaattccgcgaaaaagcttgtcacacttacttcatcggacccctctccacgcggttcttgttcttctgtcttatccagcttctcccaattcacctcattgtcaaacatttccttagtctttcccgccttatctgcgcttgtggtttcgggagtcggggtggtcctcgctgcgtcccgtaatggcattggcccaaaggaatcctcactctccttctcgagatgagtcatctccactggggttggaggaatttcaagagtgcgccaatccggttgggtgtgctctgaactggactggttatcggacaacgcgacggtgaccattgagtcatggttcggcgcgtaaccaacgctcgaagatgttggctcgaaaccttccattattgtgaatattgtgacgtgattgagaatcgagtatgtgactgggggttgcaggatgtagacgcgttattgttgacaatgttgatatcggacagggttattttaggcgggtttcaactgcattgcggatctcttcacaatttcgagtattcaagaaaacggattctttccagcagaagtgggacctggatatgattctaaacttgtatccagtacaagaagaaaaggctggagaaagaaaaaagggagtcaggagagatcccacctatttcgttagcccccctttacctttcccctcgtgtagtctcggccccgtcgatcatcctcatacaccgactgtttgaccattgaaatagatagattatgggatcttggaggaaacggctacagatattgtgactacgctgtaaattgtatgaatgtagttaagaagggccaattccatcgctcttcacccatcagagttccccgacatcaaccgaaattggtatcggagggatttcgagtccattacggagtattgcatgttccaattatacatacataggactcagatacttgaagtcatctgaatgtctcaagtttagttatttcaactgcatattgcctgcaggtacatagtacagcctctcatatttgaaagaccaaaggccaaaggggtaccgtcattgtacaccgttatatctttgatacataaaaatatccatctgtaatctttcgtagctctgattggttgatatcttaaatatagccgaattgattggtcgcgcccctagcggagattgaaatacaattaccacccctggcttgtccgttcacctcaatattgaggctggccaacgttgttgtacttcggacaccgtatcattaactcattcgtaaatgacttgacacagacttctttctacctatattgtaggtttctgaaccacccctgggcctcacaccatcgactattcccagagatccacagagtgaggtccatgcggtccgcctgtcagacctgggtggtcttccaatccacctttcgaggtttcaaggagtttctcggatatgttttcagagtggcgttaatggctgtctatattcatccagaactccgtacctgtatccactagaaagaatttcgggatgatagaatgacgtgtcatagcatatgactttaaccaactacataactagtgataaagagggatgtgcactgtgggcaatctggtctccctagacaagaccaggggtgatagggtgatagagagaataccaggggttgctctagaataataatggaaggtggaaagtgggaagtgtctgtattgcagtcttacagtgttcgttgtaatttctaaacatccaatcttctccaagcgcccggacaagccgaacagttgatgaaaatgagttcgcgtcgatcggggatagtgtaagcccaatgacactgtgcaacgaggcatgtgcaagcacagaggccaagtcgcgaggtcaaatattggaataatcatgacgttctgcaatacagaactatcagcgattgaactgataagaacagatactacacttgatctaagccagaggcaaagagagctgaagaagaaggaaaagaaaaggaagttctgggggcagggccaccttcttataggtatcctaagggcggtcggtttatgccactattcacaaatgagacaaacaacgacnnnnnnnnnnnnnnnnnnnnnnnnnnnnnnnnnnnnnnnnnnnnnnnnnnnnnnnnnnnnnnnnnnnnnnnnnnnnnnnnnnnnnnnnnnnnnnnnnnnnnnnnnnnnnnnnnnnnnnnnnnnnnnnnnnnnnnnnnnnnnnnnnnnnnacacttgatctaagccagaggcaaagagagctgaagaagaaagaaaagaagaagaagttctgggggcagggccaccttcttataggtatcctaagggcggtcggtttatgccactattcacacatgagacaaacaacgacatatgctcgcttaattgaatatgtaaatggtaacgtgatgatagagataatcaatgttgataaggtagatagctggataccataggcaaggatatctctttgatgtgtgttacttattggtagtgacaggcacacaatgtgtcctcatagtcactttatatcaagtacaacgctatggatatgggaaatttaagcctcacctacctacatcctagagggagaaatagattctagtcagatctgacatttgaaggagtctagttactccatacttgctctggtttcacccacatttagactcaactccgtattggcgctaacttcattgtgacatttgggtaaacgacagggatgtcatgtcagagatactaatcatgcagtctataaatctgtagatagctgtttctatctcatcttctgcgaattggaactgcctgttttccctcgtttgtttgtgaattgcctatttgggtcacatttacaggcggtgaggaagaattatcatccgagtggttacaaactgcccaccgccccctgtcagtcgcgacttccccgggcaaaaaaacaacaggcgcttcccctccgcgttttatctcatttctcctcttttgcctctcgctttaatcatttccgacttgagcatgctggagcttcattgattcgctctttggcattgaaagatagcgtcattcgttcgcttcaactctgaggcctggcttgggctctttccttcccccgtagcgctctatcaccctccatctaatcactcacttctatcatggatgactctatgaacgaggactcggtcttcgatgatgatggaggcagctctgactttgcccctgagcctgcaccggtatgaactttcatcaatatactaacaccagactcaactttaattgctgacattatacgtccccagaaacccaaacccaaggcggcccctaagaaagctgctgccaaacccgccgctaaaaagaccactcagacaacactaaaggtcaagcctgctgcaaaggcagctgccactaagaagaaggttaaggcggacagcgaggacgaagtgtccgatattcagatgtccgatgcggattctctgctctcccatacccctccaaaggccaagaaaacggctgcgcccaagagagctggctcaaaacctctggccgatgttgaaaatgagtctcacggaggagacactgctgccgacagcgcgagtaagagtgtgaatgcatctgataagtaccagaaagtaagtcccctacagcttctaacatggtataattttggccgaatacttatatcaattcttaaacgcagctcacccaacttgaacacattatcaaacgtcccgatacctacattggatccaccgaacgcaccacgcagcagatgtgggtgtacaactccgtaaccgagtcgatggagtaccgcgatgtctctttcgtccccggtctctacaaaatcttcgacgagattgtggtcaacgccgccgataacaagcacaacgacgagaacatgagcgagatgcggatcaccattgaccgcgaggccggtgaaatcagcgtgtggaacaacggacgtggtatccctattgagatacactccaaagagaagatctacgtacccgaacttatcttcggccatctgcttacttcctccaactacgacgatagccaacagaaggtgactggaggtcgcaacggcttcggtgccaagctttgtaacgtcttctcgacagagttcaatctcgaaacccaggactcccgtcagaagaagaaatacaagcaaacatggacccagaacatgacgaagatgggcaaggcaaagattacagatgccaagggagatgattacaccaaagtcactttcaagccagactttgccaggttcggtatggatggcatcgacgacgacttcgaagcccttgtcaagcgccgagtctacgatttggcaggtacggccaatgttgctgtcaagttaaacggcacacgcgtccccattcgcagtttccgaaaatacatggaaatgtacaccaaagccattcgcaaggagcgcggtgatgatggtcctccctccaaggatgaaattattacatgtagccctgaccctcgatgggagattggttttgccgtttcggatggttcattccaacaagtctcgtttgtcaactcgatcgcgacaacctcaggcggaacgcacgtcaactacatcgccgatcagatttgtacccgcttgtccgaccaggtgaagaagaaaaacaagtctggagcaactctgaagtcagcgcagattcggaaccacatcttcatttttgtaaaggccttgattgtcaacccggcattcacctcccagaccaaggaacaattgacgacaaaggcgagtcagttcggtagcaaatgcccccttgatgaagatttctataagaaggtcttgaagactgaggttatgtcaaatattttgcactacgcggagcaaagggccgaccagatcttgaagaagggtgataccggccgacgcacgcgtatgaacaacccgaagttggtcgacgccaacaaggctggtacaagagagggtcaccactgcaccctcattttgactgagggtgaatcagccaagggattggccatggcaggcagagcagtcgttgggccagacttgtttggtgttttccccctgcgcggaaagcttcttaatgtccgcgatgcttcttttgaccaaatctcaaagaacgtggaaattcagagcatcaagaacttcattggtctgcagcacaagaaggagtacaccgagaccaagggactgcgatatggccatcttatgatcatgactgatcaagatcacgacggtagtcatatcaagggtttgctcatcaatttccttcaagcgcagttccctagcttgctcaagattcctgagttcctcattgagttcatcactcctatcatcaaggtttggaagggtgacccaaagaacccgaccaaacagaaatcgttcttcaccatgcccgaacatgacgaatggcgtgaagcccacaaacacgaacgcggctgggaacacaagtactacaagggtttgggaaccagcaccacagaagatgcacaggtttatttccgcgacctcgatcgccacctcaaggagtttcacaccatgcaagacggtgaagccggactcatcgagctggctttctccaaaaagaaggctgatgagcgtaaagagtggcttcgtcaatacaaacctggcacattcctggatcattcagtggcgaagatcacatacaccgacttcatcaacaaggagctcatcctgttcagtatggcggataaccaacgctcgattccttccgttgtcgatggattgaagcccggtcagcgcaaggtgcttcacacctgtttccgtcgcaacttgaagaaggacatgaaggtagttgagctggcaggccatgtatccggaatgacagcctaccaccacggtgacgtctcccttcagcagactatcgttggccttgctcagacctttgttggctccaacaatatcaactgcctggagcctagtggaaactttggtagtcgacttcaaggtggtggcgattgtgccagtgctcgttacatctacactcgcctatctccctttgcacgcaaggtcttccatatggccgatgaaccattactaacttacaacgaagatgatggcaagaagatcgagcccgaggtctttgtgcccgtcgtcccgatgattttgatcaacggcgcggatggtattggaactggttggagttcttctatccccaattataatcctgaggatattgtcaacaatctcaagcgcctgatggctggcgagccgactcagccgatgcagccttggttccgtgggttcaccggtgaggttgtagccgtcggtggggatcgcttcaaattcagcggtatcatcagggaatgtggtgataaggaggtcgagatcaccgaattgcctattcgaacctggacccaggatttcaaggacaagcttgaggatatcattaaggctgagaaggtgccatccttcatcaaggattacagggactacaacactcacaccaaggtccacttcatcatccaactagatgagaaacacatgcaggctgctctgactgaaggcttagaagaaaaattcaagctgaccaagtcgattgcaacaaccaatctagtggctttcgatcccgagggccgcatcaccaagtacgccactgtcgatgacattctcaaggagttctatgttgtccgtctcaagtattacgagcgacggaagcagttccaacttgccgaactacaaagagatctggagaagctgagcaaccaagctcgcttcgtgaagatgattattgaaggcaaattagtcatctccaagaagaaaaagcctgttctcatcacggagttgaaggaaaagggcttcaagcccattgccaaggtggctgaggccgctaagatgggcgaagatgagcctgtggtagaagaaggagaagaggagttggatgaaactgacactcaagtgctatccagctcatttgactaccttctgggtatgcctatgtggtcgctgacccaagagcgcgtggacaagctccttcgccagattggcgacaaggaagcagaagtcgacgtcttaatcaagctgtccaaggaggacatctggacccacgatttggaggagttcatcaaggagtggcgcttccagcttgaggatgaggaccgtcgcgcccgcaaggtggctagcctggaccgtcgtgtctcgactaagctggccactggtggtggtcgcgctgcggcttcgcgcaagcgtaaggttgctgctggtggtgatgacccagacgacgaagacttcggggcccctaagacaaagaaggccgccgcagcaaagaaaaaagagcaacccaaaaacagcttgatgaatttcctcagtcaacctccaaaatcaaccccatcggccgcaccagacggaactgactcggacgatgaattcaacatggacatggagatacttccgaagaagagccgtgctacctcaaagcctaagactctgcctaaagaagaagacgactttttcgatatcgacaacattccccagacctcgcaggcatcagctcagccagttgatgatccgatggacgtagatgtggatgaggtgccaaagcccaaaccggcagccaaagcaggggctaaggcagcggccaaaccggcagctaagcgaggacctaagcctaaggctaaggtcgatgaggattcggatgacgatttcttggagattgccaaatccgaggcttccaagcccgcagtgcagtcctctcgcgctcgcaaacctgtgaaatactcagcgcctagcgattctgacagtgacaacggtgatgatcttcttggagacgtcagcatgatggtcaaaggcattggtgctgactcgggcgccgattctcgacaactattctcggagcgcccccgttcggaaagcagttccagcgtgaagactgccgcgaagtctcccaaggtcaacgacgattttgatccggatgagactgactacagcaagcttattcctcaaaattccccacgacgctccatccaggtcaagcccaaggacgtcaagctcgataacaacgatgaagatgacgaggaggaccagccggtcaagacaaatgctcgggccaaggctgctcccaaatccaaagctgccctcaaggtcgtcgatgatgaggacgaggaggagccagtcaagacaactgctcgagcgaaggctgctcccaaatccaaggctgcccccaaggtcgtcgatgatgatgaggaggacgacgacgagccgatcaagccgactgctcggggtaaagctgcacccagagctaaagctgccccgaaagccgctgctgccacctcggcaccaaaggcccgtggtcgcccaaagaaagagccagctgcgactccgaagcccgctcccaagtctgctcccccggctttatccccggcggccaatgcatatggttctaagcacagcaaggcaagcaagaggatcgcggatgattattcggaggatgacatcgacgcaatggctaatgacattttggattccccggcgggcaaagtgaatgtggatatttcagaggacgacgagccggctcccgccccccgtcgcgccgctgcaggccgtcctgctcgtggcgccgtacagcagaagaagtcctatgtcattgaggatgatagcgatgaagaagcatcggctgatgactttgacgaagacgaagatgagagcgactaagtagtgaaatagtgagggtcggaagcccatttgcgatgttctgctttttttttttgcgacgctctttattctggtttttattttctttcatttccatgtcttactttattggtattttatggagatctggcagagccagtggatgcaaggcgaatatgcgatgttcaatcttacttttctatgcgtaaatctttcaaccgtagcctcgaataggctgtttggaactccacagtgtcaactaatccatcgaggccttcaattctgtttcatacaaatctaataaagggacactgacttgaataagcaaaccctcaactcccaagttatcaaatcacacaaatgttcctcacaaaatgcatagagacaacaccaccagcaaaatcttcagctcctagaccataaacgccgttccatgtcaagttcgtagcgtaatcgactatcaaagcgaagctcgacgtcgcttacgactccgaaattcgtccccatcgagagagcgagtgccggaaagaggggtcaactcgtcatcatccatgtcagtctcggttccgatgctttcaagctcattcatgtgcagacgaaggagagcttcagcagcctttacttcacggttgaagtgagccgacggctgaagacgcagagctcgggactttcggctggggtacttcttagtctgggattcggggctgataggaccgtccttcgtaaaagaagctcccctaggggtcctcttcagagggggtccacggtagtcttcatcatcagcatcgtccatttgccaatcatcatccgaatcggtttcatcatagtcgctttgcatggtagcgacatccgaagcggtgttggtgggctggtcgaggccaccgagcttgtcggtttccatatgcccgtccatagaaggacagtttggggtagaatacacgttggacgagccatcgctgtcggtgtcactgtcttcgctgaccccagggacattctccgggcgcatagcatctgagatggcacgaagaatcgtccgaggcgattcgaaccgcgagcgaggtatcacattggagctgcgcggggggttgatgggcgtaaaggcagacatagacgactggctcttgggcgacatgcagtaaggctccatggaggagtcccgggcgctgggatcactctcagcgtaatgggtgcgcggaatcttgagtggaggcagtttcaaggacgagtcttgtcggcttaatgctcctataccatggagaagggtatgggttgaggaaggggtactgattgcgggagggctgcctccggtgctagagctagacttcgtctccaaagagcgatagtagttggaggtgtgggtggcacgctgtacgatctctggagggatgaccatgcggccgtgggtcttgcggtccgttggggggatacacatggctgggaagtctgtgccaaacagtggagtcagggcgtatcggattctccagcagaaggttgctgccatggctttggcggcttcgtagggcatccagtatcctatgtgaaaagtgaaagtgttagaatcacccaaggttcttttggatgagaagaggatatcgatcttaccttgagcagaaagtgctccaccggtgatgctgtgacagatatcgcgcaggccggggttctggttcagcatcttggctggcatggtctatagtgagttagagataccaaacatatcgaagatctatcgtatgaacttgccttggggtagccattgcatttgaaaaggtgtgtaatccgaacaataccgatgttgtagtcccacataacatgccattccttgtcttcgccgggtatttggaaagtatattgaaatactagatgaaagagtcagacgtgaataccaaaacatgctcaatggcacataccatggaagctatctcggccggtcttctcttggaaggttttcttgtcgctggcataagggatatgacgaggatagtcggcaatgttgcccatgggacgtaacgagagctctctgtgagccttctccagatctgcatctctttcctcgcaaggaggatagcggcactcgccctggatcttgccacggcggaaaattggggcgtccttggccatctttcgcttctcttggacagggaaaggcgggtaaggaattcgcctttcgggctgaggattcagaagggagttgatagatagcattaagaagttcaagtgctatccttgagagaagaaaagagttgaagaaatacgaagactctagaggaaagaagcagcttaatgtctctttggaacaaaaggtgttttccagaaggatgaaagacagaacagtcaaacatgcaagaaaaaaaacaaagtagagcaagacaattcaagacctttgttcaaaggtttgatgtttgttccgcgcagcttctaaaggtgaggtaaggtgagtcaatacagatgttgtttgttggtaaagtcaactttcgaggagacagacagcggtgaatagaagaaactcggatctgagagttgtcttacacgaagaatggtaaatgggcttcaccgattctttgcctctctcttttctctccgcctctctcatatcacaagagtgaagtcggacgagtccatgggctgtttgtctctccgcgtggaagggaaagttcccaatgatcttacactttggactgatgatgcagtgtacattgatttcattgatatccctggaaacaattacaaaatacagatattgagacttgtctctcatctctcgaggcatagcctgttctacattcacacctgcaacttcccaagcctctaaagtgatccgtgaaagaaaagcatggcagcaaccgtttcaggaaccgtgaaaacgcagtcaccgcatgcaaacagcctgctacgcacaaaggtgcctaatattatcctcaattatgatgtaaatgctaatatcctggggtagagagctcaaccgttgtcccaccatctttctttttcttcagaatcttatcggagaacgcatgccagatcttccttgtcattggactggagggtactgagcaaccggagcattaggacaacagtccaatggcccaataagaagctacatactccatagctcggcaggatgaacattaaagaggtctcaggctcacgggaagctgcagggcttgtatgacaggaagctgcattgcctaacgagtccgcgaagtgcatctgagaaaagctgtgctgcacagataaacttctgacagaattaacgatactgggaaaagtgacagtaatctctccacttgcgtgtcacgcttccttgcctacacagtgtaccctagactgtgcaagcggtctataaatttgatatgatgggggtaaggctgaggatacaaaaaaatgctgatcatagactagaatgttctttattgtctattaaatgcaggtttgcacctcggttcttctctttttgtcttggttaatgtctatttgaaactatccgaattctcagctagaccgctggttgaaatcccagggcgtgggtataacagagacatggactctgcggagacgcaagagacataacgacttcaaagaatattccatgcatccttctatgcagtattccgacacgttggtggctgctagagcccacttttcctttctttatctttgggttttcttttctgcttgaatcaatcaacttataccagtgtcacagtgacttcccccagtccgtttcgcaatccgccattgtacccacctgccagtctagtgtagtctgcataagacttccaacaggtacaagggtccttccgccaatcggtgccgggccggggtagcatcctgagcactgcagaaaacggtgcatatagatgccggcaggacgctacgcaatctagccagagactgtaaatatcgaggactggggtttcaactagatgtcaacccaactgggctagtttcgagtgggatgggttcaattgcattggagtcggtctgcacagagtcccaacagccgagaccgctacgagagtctggaaacgaggactggtttccaatgtcttagacactctgctgctggctaaacatcctccgtcaaatcacaaagagcggtaaaccgcgacatgcgtgtcccctcagcgtctcagatcccggacttctggaaaaggggcaagaagccatgtctcaattgggatgctgctgttggtgtttaggcctttctcaagcagctattttcatgcctattcatttccataaagtatgatcgagcttattcgtaacatcgactctttcaggttgcccttgggcttccttctttcacgtgtttatcgaaaagtcggactcattgttcacatcagagctggacactcttggagatgatgtggtatcattacagtaggtctcagactcaacggtgaaaagagaacacaccaagcgtcatactcgcatgagcctgcaagactcggtactaaatccatgtctcaaccaggtgaaagactgacttctatcacaaagaggtccagacctcgacccgttgaacacagaataccaaccggacccgaaccttgagtccagacgctcaagattcacaagatactcctcgcccgcagagatcagacaacaacccggaatctgtaccacagcgaatccggggtatacggggtgtgagaggtgaagggaaacacagtcccgagcacgactgaacaaggcaagtcttcgagggagaggggaagtacaatgagatggaaaacaaaaccgtcacaggctggtccgaattgcaatatgacgaaaagggagccgggttgattgttcctcatattgagatggagaaagagcaaacctctacggctgtatgggtctacaacatagtaaatattcatgcctcaacggaaacatctccatgcgaatccattgttaaagatccctgctccaacaattctctgattttgaagttctgactgcatcatgctatcagttctcccaggcgcgtgaacagctcaacttccatccgctcagccgcatctggctggctaagaatttcgcccatcgggtcttctccaagatcctcctcccatactgtctggggctctgcattgaccttcagactcttgtacaggcacatccgtaggtgccaacgaaggaggttggcgctcacacgcagggttccactcagagcagagtttctaagacgagtgccaccaattcccgtagtatccgttacgaatacgatgatcttgtagtcggcctatgtcacaaccattagtatatatcggtagggtcttacatcggggtcaattcctatttcaaaagcatcgaagtgggtatggatgtcggagcggagaagaagcccattctggggagaataaaggccagattccccaatctcgctactaggcctagtgtcggtaatgtaccgccgatatcgatttcgttgccattcatccacattactaactgggaatacatgcgtagcttcgagacctcggaaaggactccgacggctggctatagcattcggcccagtaattgcacatgcggcgtctctagtgcggaggctgttgcgaaatttattctgctgtagaaattattagtactggttttgtatgcttaatcatttacacattccctctgaccctgggattgggaatcggcactttgagttctgacacggcgtggcgcgcaatttggtattagattgatgatgatgggcgcgtgatctatacgattgtcaaccttggaaacgccagttatgctagatgtgtcaaaaatacttagatctagagccacatagttaccaggattcaccaaactcgcactgttatgctggagtgcagtgtttatctggtgtgttattggcttgcaacttataaattgcccactcgttttggttaggggagatgaacaacaaccaacaatagcgacatagcatctcctcggagatatatcgagcttgttggacagttgggatttccagggctataacaaggctgtattagtcgcactggctcctataaggctatcgtgacttaccggcaagaagatggccgtcgctgtcatatatctggaggtaccttggtgtttcaagaacaagagctggcatagctgctgtcatattggagttgatgaaaagagaaagagaaaaatgaaaacaattgatagaaggcgactatacttcccgattaggttagcttggctctgatgtcatccttagattcctcgggtgtctgtggtgctaagtcttgcaaagatagaagtgttttcaatgcagaataactaagatggagagaaagaagaagcaagttgcaaagtgagaagcagcctgttgatatagctatccctttgcaaacatcgcaaccctcgagcccttctcttagctagcaaacaataagaaaagcgaaggtaagatcatgaatttatgtaaatgtagttccattagaaacaatatgaacccgaaaaagacatagacagggtgtttgcggaaaagaactagacaggtaaaaatgcccagtatgttagggggaataaaataacgaaaagaggcaatatgagacatgaaaaactcattcatcgctccaagaatcctccttattttttgtccgtcgacacgaggaattggtgatcagagcgcatgtattcccaaggaatccccaacaagaacaattgacttgacaaccgatatcacgtgccatttggtacatccagcaacagtcatggccagaataatgatatgcattcaccaaagaattgattgacgctcaagttcgaggccaattaacattcccggttaagatggcctagtactattaagacctattcagatagccagaagaggctcacgacccttcgcctgctctgccggctcaacagacgcaacaatgccagactcgagagcctgagcgacaggagcggccttgggggcctccgggaagtcctcgtgcttgataacgggctcgacggcaggcttggcgacaggggcagtgaagttggcagcgggctcaacggtctcacgcttgatcgggctcgcaagcttggtctcccgggaggcagagcgtcggtgggcgatgtaaccttgagccttagagctgtactcaccgacatactgcttcaccaagtcggtggcgtgagaggtacgctcgccagccatgtctcgaagctggttggtctgggagttgatgatttcctggtagttggtaatctgctcgtcgatgaattcacggttgctgatgtagatcaggggggtgaagtatgtggtggtcacggcaatcaaggccacgccccagaagggaaggaaacggagcagccagtagccgatgaaagcagcattgaaagcctaagccgttagtctctgcctttttatcttcgttgataagttcaaagttgcaacctacaaaaacggtgtggaggacattctcagcgaacaggatgcgctggaactcgatcaagaaaaagtccacgagctgctcgaggtcctcgaggacaccctcaataacctccttggggacagtgtagtaacggcgggggcggaatccactggcgattccccgcttgaggataagatggccagcaatctcgacagtggcggtcactaaacacaattgttaaccaaccactctgttgaccgtaggtcacgcgaccaactcacctcccaacgacatgtacaggaacttgaaggcccagcggaggagaggcatgtaacgagcggcgaagatgaaacagatcatgctggcgtaggaaacggcggtcgcacggggttgttcccactatatccagagaaagattagcaagctatccaacttgaagactcgggcgacaactcacgctcaaaaggctgtacatcaaagagtggtagtctagacacttgtcaatatcccatcacccaattaatccagttcttatgacctacgagtcaatggttgaccatcggcggtggtgttcgaaggggtcacacgcgagtttttcagatcgcggaactcatcgctggtgcgggatgcttcggacttcacattattgacaattgggcctgtggatgaactagtcagcttgctttgatcgactttcggagactttcagacgcctgcttacccttggtaataacatcgcggatgcctgaacgcaaaagggtcaaggtcagtctctcccacgaaatctagggaaaagaaaagagcgcaatactgtggggtgactgaggttagcatattcatgttgtcgaatggaattgacttggttctcttaccttactgcccgtgttagggtaggtcacgtcaccagaagccataacggtgagattgtgagaagcacttcagggggaaactttaaaaacggaattagaaaattcgtaagaagcgtatcaaccgagtcaagacgtgaaatgcagaaaagaaattaaaggggggaagggggagaagaagaggaagagaaggtgagagcacagaaaagataaggaaggattctcgacttccaggttgttgtgatgctgtcatgtgcgctgccaagccccgaacagctctggattcagggcatttgtcttatgacgaatatctacctgggaacatgtcttataaggagtacattcactggaaataccttttattgggaggggataactggaaaatacatagtctgaccttacaagtatgtttgttgtacatatcaggccactccgagactattgtgtcttgaacgccataccccaaagctatatatactccacacaatgtcgatgtacaacatagctatgacttcatacacaaccaatcacaactagttccctaaccttgagctctgatgcaatactctatcctacccagctgtaccccagaatccaaagtataagctttaagactgatttctgaatcgatttcgcttccatgttgggtaaggaccgtaaggtattccaacatatgatcgccaatccccgctagcatatttagcctcatcgggtccgaattcggtaataatctgctattgatctgttattagaaatggcattatattaggagtatcctaggtttcacttttctactttcttctaagtcggctatgacaaaacaaacgtggcaggtcattcaacagtacttcggttgccctaatggaaaagcaggtagctcccccattttctgccttgatatcttgagaccatcaccaagacatcggagtatagtacttctcccaatgaataggcgtatcagccttctggaacttttccatccctccagaaacgccatcctccgtgaccacccaatcacccaactcaacacgctctgcccaactcgtcaataatccaagaactgccaatgaccccatacagggagaagcccagagtagcagataatttgatatagctgatcggcttcatcggtaagtaggggaggattcgaagacggaccaagtagcaggtcgttgctacttcgcgcatagccattcgcaccgataccaaacggtaaaagtagcttacactgatttccatagtcttgcgctatatcttctatgtaaagatcagtagggataaactctagttccccatcagggaaccagggtccaacctaaggggatttgctctctccctcacctctgaatagaagcagaggaattggatccttctcgttatagtcgatcctgttactcaaatcagagaaaagcttgggaaaaggctgatctgcaatatctgacggcgattggagttgaactccgggagcgatatatcggaacgaaagacgtcgattcggaagagcgagaagaaacgatcggagaaaagtgtcctcttttatataagcctcgccgaggaccgcggtaggatataaaagatctatctgggtctggagcgatggtagcgtaaacttggagtcactgggaagtttttgctcaatagcgtcgataagtcgaacaaaaacggccactgctctttcaacgtcacgctttgtgaaagtttcaaaattccatgaaaagaatttcgaaggcgttgaagacgtgtacacttttctatcttcaatcatctgaaggtacactgtaagaatatcctgtagaggtctccattgccatgatttatcgcaatcgcaaatcagactttcccagtctggaaaaaaagctgtaagctctgtacctctgatcgaagctaacttatagttagaatagaatagtgatataggacaagttgatcacgaacatgatactaacttcttcaacatcgaccgccccggtagccggatataaccaaacaaaacgatcaccccatgttttgagggttgaggaataaaaaaacgtgtttgctcctgtaaactatgcaaaaaataaaagaagcagagacctgagcctattaccggggcagaaactaccttcgccagacgtaggaacgaaaccagattcggaatcagacgggaatcaatttcaacgggagcggaagtttgccaccaactagtggaagacaatgtagacaaatcatttccggccgctgtccatgcatattctaaaatcttgttgtgaagatcggcagaaagtgccgggtcaaattgggactccggcattagtgcagactagcagccagtagggcggacctgatagggcgatcaggaagctttcacggatgacacgggatagaacacttcggacactgaaatgagggagttttgcaaactttgctggataaatacgcccagcgagggtggcagttaactaaggggaccagaagaggcaaggatcgcgctagcacgctaggctatatcaggaggaagtagggtgttattgcagggtccaatgtgatatgtttagcttcacaaggtgctatcaaattggactgaaaatgttgaaatgggcgttaatgaaatggatgaatggggttgctagtgggattgagaagttcaaagacactgatagtaattaagagaagtatcagatcccgttgtcttgggtgaaatgagtccttatgctatctaaatacctgccaagatgacctggcagcatcaaattcaagtctgaatgtagatatataatggcgatacagatacgctctcacgctctcacatccagatatacagtgtcagttggacatgcaccccaaatgagcctcaatttgggcgggaatacgatgatcctggtgtcactcagtgcaccatttcacgtagtatcagaaccccacaaatttgtgcatccaccttgagccctacggccgatattcaccccggatttcgttgcccctctcaatcgagatattcgcgctctgtccagaggtcgcagtttcccaggttctcgaggtgacgatccgaactccatcgtaggctccccttccgtggccaccgtattgatatctccctctcttcgaatgacatcgagaagaacgccgtggccaagccaccgacgctgctttccatgacaccggcttctcgacgtggtcaaccatggcattgacgtgcgctggctctcccaggtgaccgagaaattcccacaagagcatcaccaatgaggagaaatggctggccatccatatctacaacctggaccaccagaagatccgcgcgagctaccacctacccatttcggcaattaggccgtcgagtcgttctcaacccgatctttgacgagacaaagacccgtgaatgcagagatagacgcccatgtatgaggtaaacgagaggccagacgaggctaaacacccgggcttccgcgactttgcgcaggagtactactaggatgtctcctgcgtggggacgccgtgccgctggacatgccggatgacttcttcacggaccacttcaagtgcgatgacatactttcgtccgtcgtcctgatccgctagccgtttctgacagacagtcccgcgaccgccatcaagaccgccgacgacagcaccaagttcagcttcaagtgaagacgtctccttcaccgtcttgtaagtccaaagtgcaggatctcaggttcgaacccttaatggtggctagacgtcaagccggatgataccgggtatcctgtcaaccggcagccacatggcccacatcaacaactagtactccccggcgccgatccaccatgtgacatggatcaacgccgagcgctagtcgctgccgctctttgtgaatctggactaggagaatgaattgtgccgtgagatcctgcgcatccggagattccgagggcaaggacaacgagcgaaccatctcctatggaattatctacaaagcacaggatggactatttggatcgaattaggctttactactccgtcatccataatatttagtccttcaagggaagcgattaccatctcggcaagacttgactaagtccttgaagcctagttctagctacctagttaacttatgatactgaactaacgaactactcacgtagttaaccagttaactaacagaagtaactaatagacaggagctgttacgaatagaaactgtcaaaccgtggaattcaatatttatggccggaaggggaaggaccatggatcgacagcttgtacataggattgtcttccccactattgatggcctgatccttatcctggggatattctgacaacatacgtcaagcctagccctacagggagttcaggactaccgagtcaaggactaaggtgcagggatttcactggaggagccgtcatttaacgctcactgatgtcaatacaaactgcgtcgaactcaagtatatcgtactttgttagtctcggaacatgtcactgctgatcccgaatatttactagggctaaaaaggtctggattgttgttggacgcagtgacttttttttttgtcacgccactcgccactggtgaactatcccaggacatcagaactgaacgattttaacggaatttgccggttctgtttattattttgtctccacagacgttattttctatgacatggaaaattcttcagccaactgccaaaatggggttcatgcttcatgccacccaacccggcgtgttccgcagccacaacagcgaggaaacaggttggctgatagagcatcagttgacctaatgcagagcttgactaaatgacgaaatgacgaaatgaagatcaatcgaaattgaattgcttatattgagcttcttctgcttcaaagtcttgttttttcttttctacattcatcagcaacaagccttactctccaatcagccaagtcaatctgccagcttcaccagctatggaatcattatctgctttcgtcaagcgcaatgacgcgcttaaaatcaatcctccttccgccgctatccatatcactagccgtggcagtgactggctatggactgtctttgcgataaactacttctctcttgtcgtcttccttggcctcttgttccggaccccgcgcagagaccgcatcttccactacatcagtatcctgaccgttactctctctggtatctgttactttaccatggcttccgatattggctctattgctgttgcccccgaatgggtacgaagcagtcatgaagtcgccggagccactcgacaggtgttttggatccggtacttggactggtatgttaatcctaccttgatctaggatccctgatggaggtgactaacgagctattaggtttactacgatgcctttgatcattttcaatgtgctgctgacagcgggtgtctactggcacaccatcctatacactgtcatgatgacgatcatctttgtcatcctgttcttcgtcggtgccatcgtccctgatacctatcgctggggttactacaccatcggcaccgtggcgcttttccttgccttggagaacatcgtctgggctggcatcacccacgccaatgccctgggtggtaatatcaaaaagttctacaccttcttgggcccttacgtctttatcctctggatcctgtaccctatttgctgggcctgttcagagggtggcaatgtcattgccccggactcggagcagatcttctacggtattctggatgtgttcagcaagcccatcttgtgttggattatcctctttgcccacacccgcattgatatcacccagctggatctccgtctctatgaccgtggagatgtggagaggaacactccaagattcaatgagaaggaggaagagagaggtgtggccgctgccaacaacgatcccgcccaaaatgtttagacccctgtccgataccccttgtctgataccaacagtcgagggattccctcgctgaagactcaaattgcgttgcagaagtgagaagtgcttcggcactccactattcccaggtatatgtgttattgcccttattgccctacgagatacgtcctatctgtatttatatgaacatatctaataatagtccaatttaacctcgattaatatatgcagacttctattcctattcactggctctgctataactagacaacaatccaatttctgaagctggccagatggccaggtacagtactccgtattccgagcgacgatatgataaatattgcgggggccatctcggggatcatcattgtgcctgtcattcagaaaggactctatccttaccttacaaagagatgagtctcatttggaccgattttacggatggcgatggcagtcagctccatctcctgactctctctatagtttacacttacctaccagggccatgctatgatacaccactcgcatgtcctgcttttaagttctgacgtactttggaacgttggcggaggtgttttgccttaccatgggaaccgattatgcttataaccacccgcctaaccttgtaaggctgtctaatttcgagctctcgcagtctactccgtaccccgtcaaggcttatccatgtacgtattaacctcgtatacaatttaaattttgagtttgattgcttaatttatttcgcttaatccctaaaaatagatatttgatgataatagttggacgatgcccactattatcggaggcagcttcgcttcagcctcggtctcagcctcattgggggcctaattcggtagtacatactccgtatacaacatgtgggcattcctctctcctctctcatttccattttcaaggcctaaaacgaaattgttactgaaaatggcagagccaaacctttctcccgcttgttttacagagtacaatgagcaaacccaaagcagcctattctcgctcctacctccagagattcgctatgagattttcgcttacgctttgacaagtgccccggacaccaggcaacgacctgagcgagatggatactgcaccagaccaggctatgagaccccccatcgaacctacacagaactgctccaaacctgcagaaaagtctacatggaggcatggtttatgcccttcatctgttcagagcatgcattctggatggcctcgtcggaacgtgttccggagcgaattatcacggttgagaagatgcagcaatgtctagatctaattcatgatcgacatggcgaagtgcagggcggccatattcgagtgtttcctcagctatggtgcctcgaggggaccaaagacttcaatggtatattcgccatgcgtcatttttatcccaagtctgtcaccatcactatccgatacaccgacacctggtactgggaatcaaatgatgagttgcacattgaaggagagtggggcagatggctggtgctgccctctagcgtcaccaggttctgcatcgatattgaaagcatcgagcgacgaaaagacgaagtagactatattgcgggcgaaatggccgatcgatggcgattccagcgcgccgatggcaccaacatggtcgcagccagggccgatacctccgtatccagatggacgggaagttccatgcttggcggagagcgctgggtgcgtgatgaggaggcgcctggtcagcttcggtattattttgcgactataacgtggcgaccttcgcaagagcccttggatgaccagggtttgaatcctcctctcgaagtcgattggatccgcccatcaattccggatttgggctgtaattatatcgaagaagcggatttggacaggctcggaatatccatgacagttcctgctgaacaagcggttgctgaatatatcgctgacagggatcgcaggcgtgatgtggtagagcaaaccgttcgccaggttttaccttttgtccagggatatgaagcgcttgcactgcgtacacctacagctagacctagaccgtctgactatgacctagatgaagaggttcaggttctaatttggcataattgggtttgaatatgtatttccttctcaatcgaaattcaagtgttcaagtgagaatcattccaacgaaaatgtaaaagttaccataacaaaataaaggaccacgtgacccacgcgttgccatcgaacccgattaggtctgttttgattctcattccccgacaacccagcgcgacccacaacccacaatctccatgattgtgcatttacgatttacaactctccctatacgccattaattgttagcttcatttcatccactttcgtcaacggcgcgttgtctaggtcatggcggcaagcgcgagggcgcagaagcctgtcggctcagcgccatggattgcagcagagaaggaaaacatggcggagcttgtagagcaagaactcgaagaagtggaataccctgtccgacacgaactggactggttaaatgaacatatgaccgagatattatccaaaggccaggcgtgagttgcgaccgcacactactatatgtgtctacttagctaacaatcacacaggaacttcgcggacgtgttcaagacgcccggaaagatgagaggtaagacgcctcgaaccgctcggaagcgtaacccggaagagtctcgagtggtgagtatttttcatcgaattggttcaacagctctcgtctaatgcctcttgtagcccttgagcgagatcttctcatccgcccagaaacaaatggaaaaccaagcaagcccgagcccattcatgcatcgtgttatttctaagcccgctccaatgacggcatcgcctgtgccccgcaccaatatcgtgacagagcaagcttcgcagcccgaataccccgatctcacccaaactctgaactccttccccacatacaacactgactcgggctatcatggcatgcccgatgatgatgagatggtactgcctgacgtgcaacaagaatcacaggcttctactcagccttgtacccagtcttttgaacaggacgcgcctatgaatatggatactcaagaggtcgagatctcggccagtcaacaaacgactgaagaaaccttccactctgcgcgggaagagatccgcttccgtggggagaccgtcgaaccaaacaaggacccaaccccaaccccagcaccagctccatcccaggagcgaacagcgcgtccagccgcatcggttcccaaggaatccgagactgaaataatgtcgactccgactaaaataagaaaatcgaaaccagatgtcaaaatcccggaaaagcaactggacgaggaacctgcaccaaaggacagtgatccggctatctcaaaacccgagccatccccggaaaaggccctggtggccccagtatccccagtagctccacctatcaagacgcaagagtctcatccagaggacgaggatatggaggatgccaccgaagatgctacggaagacgacacagttctcgacaatcttgatgatatcggctctccttcggacggttctactccagagcgaccattcgctcggaaaagcagcttgagctttgccactctccctgcgcgggaacctttgaagactcgaacaagccatattgacctggcgaaaatgagtactgccggacgtcccagttactttggcaaacagactggcggccataggattccgcaagctgcagcagatgataattccggtcccatggcgttggaaattgacaacgagaaagaaccaagtgacgaagcagatcctgaccaagctaccaggatgcacagcaaaaaatccacccagtccttacatgatagaatcagcatgctaggcaaactccagccatcccgaccccgaaagtcaatcccatccgcttctgggctaccaggtcagattccctacccagaccttcaagcttccaaggctgaagcaaagtctgaagcttcgaacgaaagggcacaggaggctccaacttcagagcctatgtcggtggacgatgactggatcaaacctctgagctctccccagaaacatgagctttccaggagcaagaccacagatgtcatggagaagcttgctgaattcgaaaaggcgcaagcagtcaataaaaaagatgcatcgcaaacagagcctgaacgtcccacaactacctcgatgttctcttcaccccgaccgcacagctaccagcaaagcgcttcttttcctcatatgccggttgatacatctactactccaacaggttcaccaagacgctttgacggtcatctcagtgcttcgaagctgaaactgcactcgattatgaaatctgccaaaggattgttctccagcactggcgccaccccacggatggaacattcatcgcctgagcaggcgcgcattcagccaggtgctggctcactcactaaacatgacaaacatttatctcaaccagtccctatcagcagtcctcaacgaccagaaggccggcgcacacgaagctcgaccgaaaaagaggagaaacgtcgccagcacagacgcgaagagcaggagcgtgaggatcaagaagaagaagcacgtgtcgagagagcccgggaacaagaaaagcaaagggccctccagctcaaatccgctcaggaaaattcctcggtcgagccggaagagagggcaggctcagcagtacacaagacctcccagtcacaacgccaacaatcgcgtgaacctgaattggtccaggagtctaactcgaaattttccatccctcagccaaagccaaatgaccgtcgtcctctcaaacccactcgcgagcccgtaaaacgcccaacgccgcaacccatgtcaattcgtgtcggcagcaccatgtctcgtcaacaaatccctgttccgtcgtcttccagtgctcaggagtcgagtgtgtccgtagccacctctgcccctgcatccaaaccaactctgaaaaagaagggtagcaatgcatcattacatacaacatcttctgcaagcagctttaagagctctatttccagtcaaacgcaagcccagcgcaaggctcaggttgccagcgaccgcaaaagggagcaagaccgcgaggcacgccggaaggaagaacagaagcgtgagatagaacgcaaacgtgctgcccagcaacaacaacaagatgaggcccgtcgccaggagatgagaagtcgtgctgaagctgaaagagagcgccaagctgaaagagaacgccaggctgaaagagagcgccaggctgaaagagagcgccaggccgaacgggagcgtcaggccgaacgggaacgccgtgaacggtcggctcaggaagatccaaataaagccgcccgtatggaggcgatcaagaaacgacaagcggagaatgctcggaagcatgggcggcaaggcagccagcaaatagtcaacgaggtaagcgccttgttccaattcgggttttcataccgctaacagtctccagggaccaattctgcagcacgagcagccttattctcagtcttctcaacggagtgacttgggttcttcccgtcctgcttctcgcctgggtagctcaattcaggcatttggcggccgcagcatcaacccacctccgcctaaccccgcgaaacccccaaagagaggcaacgatgaaaacagcctgcggcctgcgccgtctaaacccagcagcgtgcaatcaactggcgagtttaaacggcgaaagacagaggatgagcacaaccctattccacctgtgcgcacaatggcacaacctatccgtcaatcgaatatcagaaaggttagtaacatcggatcctatgcaatcttctttcgggcaaattattgacttcaggaatctatgcagccttctacccttggccgtggacagtcttccatggcaccacagtcgggctcttccagctacagaaatgctcaacctcagcgtcccgctcatcctatagtcacgtacacgaacggcaaaataccgtttgccgaaccaaatcatgcgcctccgccaagcgcacacaagattgcgcccaactccgtccaacgcccaccagccaaaccatctccaaagtacccaagtggtgaaagtattcacttgccggagatcaacactgatagcgaagatgatgacgattccgactccgagatgttccctgttcccaagtgggcacagtcaaaggagctggagggtcttctccgggagcaagatggtatggaagttgactcgatcttcgggccgattgcaccattctctctagaagacaccttcaaggcggataagaaggtcaagaaataccgtgaccgcaccagtagtgcgaactggtccggacccgatggacttactcaggaggagattcggagagatgttgctgaacgacagcggttgcggctcaatggtggttggagattcaacagccagtgaccagccaggtgatctttctttcttgaattgtacattggtctatacaataacggctgtggccttttttggggtatgaatttggtggtggacatggttatgccggtgttatgggtgtatcatctacatgatggcgttatcttgtattattcttgtggtcacttctgtttatggttttagacaacagctgcatagttgcatccatcggagcatggagttaatgaattgttattttggccttggatgttctcagtgttctcatgcattatgttggaattcatatggttgtcaatattaggggtgggaatgagtttagacttattatgcactacagggccgttctttacatgaactagcatcattggtctagtggtagaattcgtcgttgccatcgacgaggcccgtgttcgattcacggatgatgcacttcttttttcaattttgatattagttctacttatttgagctccgtctttctaaatatcatttaaatcttacttcttttttgcctttttctcatggcacgttatcttggtagtttaaatatagtatggttggtttccttcggcgtaccatcttgttgaagacatatatatagaaccactccattgttttacccaatctattatctaacaggtatccgcgacatcagataaatgaaaaccaaagaaaggcgctattacatcagggaatcctagtaaagcttgatcatttgacggtctaaccgacatagtcttgtacactctacactaacaccgaggaagcaaaaggcaaaggaacaaaacaaatatggcacatgtgcatcgtttatggtttgtacttggccgcatatttggccgcccattcccggaacatacaccatgagatggaaatgagaaacaagaagatgaaaggcaaaaaaagaaccccggtccaaacccatgcccctggcagcgccgagaatgatataatacaagatgctctagcctctacgcagtaaagacgccgatccatcacttactgcatatccggctcgatatcactagcccctccatcggcaacctcatccatggcatcggggttgagattggcagcgtcgggtgccacaccgatctgagtctcgtaggagatggtgcgccagccagatgcactggtggggtctttgacatattcggacatggggaactgttggatgttagaacggttcgatattataaatttgtgtatgatgcatggtaagactcacgtaatgatcattcttcttcatggtaacaacccagggaacgttgtcgaaggtcacggcgcgaatacggaagtactcgttatcaggaatcttgcggacctcccgaataaagctgtctaggtctggagtcgagacgctgttgacagcagtgaggaagttagtgggcgcaaggccgtagtggtaagcgggggaaccacggctctggagaatagtgttagcggggtttgaagagatgtaagtgaggtgtcgaaactaactctcgcgctcacgtagatctcgctgtgaaccttggagatctgctggcgaacagcatggtgaggcttctgtagaacagcaccgcagaaggcaagggcacgatccgtctcaatatcctgagtcggcaccgtggggacgcggatgcgcacttcctcgccattccgtatgaccaatgcatcaaggaattccttctcatacatgacatccagctctgaaacgcgagtgatgatcttgccatccagcgtgagaataatgtcggcttcctggaagctggtgctagggtcgggagtgacgcctgccggaggactgtcaaccttgcgcaccatgaacagctggtgtcgcgatgggttggtctcggtgaccttgttaatccactcctgcgagacgcccatgatgcgagcctggctcatctgcacaacatagctttccatgtttaagattcgcaacgttgggatttcgccttgctggatcttggaaataacggggagcaggtatggagtggcaaggccgaggtggtattcgacatccttgtgagagcttgccgagcgctcaccgaggtagttcagccacaaggcctgcaccacaccgtcttcgccgacaagcacaccgtttgaacattgtgaactgagcccagtgtccacggtcacggcgtcgaggttgattgcacggtaacggggggcagctgcgttggcggggattgacacggttgtaatatcagtgacagtagtcttggccacaacaatgcggtagttctggttgaagccgacaaatatggtatcctggccttgtttgatatagtcggtgctgagctgggcgctcttgaccggagccttgacaaggctggggtcgtattggatgatggagtagttctgaagcggatgtaggaagataaccttagcaccgacaatgattgagtcggccacggtaatgttgatgtcgcaaaggtcgtaggggacaatggctcgtgatactaccactagacccttctcagcatcgatgaccagtccaaacccggtcttcttagcttgcgggtatccatctagcttcaagggcatgatgcacgatacacgcacgaagctacggacaatctcggcagcggcaggctggctgataccgtctaactggatgaaattggcctctcttgggacaggaggttcggcaggaatgggatcggcgatatcggagaaatcccagacaccagactcgtcattacggaccgccaaccgcatcttggggtgccagtgacggtcaacgtagatgatgctagttccttttgtgtggaggtcgcgaatatggcggtaggagatcaccacacgagtgcgatcaggaatgttcttcatgacctctatgaattctttgagattacggatgggccgcttgtcgattgaatcaatgatccaccctgccacggtattctccaacttgaaagaacccgccgactcgcagacatagactccgcgagtagcaatggcataaagacgtgactgctggtacgacaaatcatggaagctggcgcccgcgactgtcacgaaacgatcgggggtgatatcatgaagatttcccacttgacactcgacctcaacgtcttgaccgcctctctgaaccagcagcttgacagattcgccgacactcgagtctaggatatcgtcgagacgaacaaacttcgtaagaagctccccattcaccttaatcagcacgtctccctccagcaacttaccatctgcgggcccctctggaagaatgatctccgccgcaagcatgttcgtttcagtaggtgctgcggcacggatagcagcctcccactccgggctcagaccaagacggcgacactcgtcgaaaggcctcaagacccactgtgtttgaatcgtaccacgagtgataggctgcccttggcggatacactcgagtgcacggagcgggcggtccagcggcaagaagtaatctgtcgcagctccgtcggctcggccaccagcctgcaaagcaactgcatggccagcaagattgaccacaggacttcctgaactaccgccactggctgcagctgcggcctggatgtagtttgtattgaaatcacagtagccctctccatattcaggcgcatttcggtccaatcgactgatcacgccggacagaatgctcagcttttctccagcatcgttacccacaacgcggatttccgtgccaacgcgcgcgccatccggctggagcttgagctcagtgactgccatatatcggattttcttcgggtcgaactttaaaataccgaaatcatgaacagggtcgcggtataccggtttgacatcgcactgcgatttgacaatcttgttagtaaccagacaagagttttgaccaaactatggcgcagcatcgacttacttcttcatggttgtcaaatatgcagtatccccagaaaggaccagaaccgacaacgtgacgattggtcaatatgtagccacgctctgcatccacgacgaaaccagttgcttgactggacattgagagctctgtatcaaacgaacaggtttgacaaaagtgaatggagacagcgcatttcacaaccttctcaatggtagcttgccattcaggtgaatctgctgcagcgggtatggcaactggtgagggagctccatctgaatccccctcaatctcatatacggttccgttcgcaggcgttgaatcgtcgggagttaagactgcaggctcaggtctgagttgcttgttcggatgctcggaattatcggccgctgtgctgcgctttcgctttgcactgatatcgcccatgccatccatagcgaagagatctgaggtccggaagtggtatggacggggttttaggcggttgacgagggtcgagattgcgcgggagcctcttgaggctaacggagtagtagataatggggtatcggacgaacgaaacacgtgaaggtgtagacgatgcggagttaaggaatgtgacgcaaatgaccgattagcggcggctggagacctcaaaggaatggaggttcggtttgaagcttgacaagatgacaaaggagggatggcagtgattcgcaagctccttctgcatagagctgaccaagagcaatacatccactagagaattgggggaaatgtgtacgcgccttgacatcgaggcaaaacatgccctccaacaaggtcccaaaggcggagaaggaatagggccatattattggccgagggcgttagttatatcttaggattattgccggcaacactagtacgattaccatcgtcttcatatattctgacaggttagagtcatacaagactagagcccgttggttctgctatctagcactagaagacgtcttaccttgaaaaggaggttgatatcaggcttcagaaggagagaacaggcggtattgccgataaggacgtgcatgtctatgcgcccaactgtcaaataagtttgaatctgtttaattttgagagataggcgcatggaatgatacgttattttcaactaatgtacaaattcggaggatgctttgtagcctgatctactcaaacatgagagttcttcctcggcaaatgctcccatacttccaaagcgggggacttggagtatctcccagtcagatacagatagaatacgactgctttgaagttcaactggtcacacacgattttcagccggcagagatggtgcgcatggtggaaggcccatgcttctgtgggtataatggtgttgaagggaatgggccggcgcctctcatagagcttgcattgatggcccaaaccatgatctgagccgcagcggtagacaaatcaggagctcgacatgatatgtggcatgccttctcacgcggaggattgcatatttcctcattaattagttcctcaaataattgattcagtcatagcgccagggctaggtccaccgtttccctgcatggacggaggacttggcctttgtggggtagaagcctttgcagagcgcgagaagagctcgttgagtctgacatatagctcattcacagcggggaggttgggaggcggtgtcatgatcgctggcatttggggcacgacgccactcggtttcttcgatcgatcggcgatagtcgcgaggtaggctaggttggcttgtaggcgtcgcatgcactccatatattcggggctcttctgattggctttggatgtatctggttgctcggacgccggtgaatttgtatccgggttggagacggcgccagccttgccggcagcttgaaggttcactacctcttgcaacaaggccgagttgatgtcaagcagagccgtgacacgggccttctcacgtgccgcaaactgagcctgggcctgggcctgggcctgggccgggttcggaaccgcaggagaggcaacggtctggggcgagttgatttgtgaagggagtttgggctgtgtgccgaggaggttgtttgctgatatggaagccatgttttgggagaaggtctgcgctacttgagatggcatgttggcgccagatgtgccttgaggggggacgaactgtcccatggaggtaggtatgggggtctgggtgtagggcgctgagaagttatccatgggtgctgctattatgattaagcatggtcagtccagatattccaaaataaagcgacctggttagttggcaacagtagacaggagacaaatggtcaaagccagacaatgccaagggccaatgcattgagagcggtagggccagtttcacccaagccgtagggggtttagggtgggtgacacaagcatgagggagcttgagtggaaataattcaatccgatcttgagcctcataggacccttcctttcgaagaatttgggcaacaattctagcccggggtaaagtgacagacgcacggtgccaatgataataacaaaaaaaggggggagggtaacgaaccggaagattgttgggggaaacctgaaggcatcatagctccaccaggaccaggctgcatgggcataccaaactgttgacccgatggtgtctttgattgggggtattgaggaacagcattagggtagaaagacatctgttggttttgggggctttgagtcgggacgggatagcccgcgggataaccagtattggggtccattgtgtattgagggaccatcacggttgagggagggctcaagggattattttcgccctgtaatatttcttctccagcgatcccctcgatttagggaggctactgtggctgaattacgcaggccgcacggacgagacggtgaaggtccaacggcgcctgttgaccaggaatccagggataggcagataggcgagatcccgaagctgctagaaacaaaaaaggagagcgatgattggctcaatcagaagacgggttgtattgggaacagggcgtctccagcgaactgggattcgtagcaagacagattctggtgcccagattcagagcgatcagccgtgggcgggctaatgcagcggagcctttttggaatggtggagacacaaggctcgaatgaatgacgttgggatgataatgcaatatgtcaagttgagtttgaacttgactttgtgatccagagtttaagagtgtacttgatgtttagagaggctggtgtccacagtgaaagtgacattcgacggtcacggggtacgatttatgcctcaggcaatgaatgttgatgcctggaatatgagcaatggtcggctaacgatctctctatttttgaccattggaactaaatagccctaataataatatcagacatgccattttcctttctatgatgtagctagatgtgaaataatggaaaataatgcaggaaaaccgtagaatattgggaaatatggtcaaaaagctatgcgcaatataaaacgatttcaagtacggagtagtccgtacgacatgtgacaatcgatagacgcctataccattttcctactcatagcaactagccgaggtcattaccccatgcaggcatcacatctcttaccgctatattaacacaggaagagcgctttggtcccgtcgttgggctcaggtgctggggagaacgccacgcacagaagaccaaagcccctcggcaaggatgccgaagggagcacggaaacttcttcccaagcaagatcgcactttgttgtacatatttactccgtaggtaaccatgtattttccaatcgcttggcacttatgtattgcttggcgatcagtacccacaaaccagactcggggagatgggcacacgcttcctatgtatgtagatgagatagggaattggagatccttcctaactcgacgtgtcaggaacagtcaagcgacacatcagtatctcggatgaaagggtaaattgctaaacgaccctatttatagtcaatcggtgcaggtgctagcgatccccactagactagacaacatgctcgtaaaggcatgcagcgtgttggatcagcaggggataagaaagcattgttaaatctgagtagtatgatcgaagcccctacaatctcgggaatattggcacaaggcaaccgcttggcgcaaggtttttggattacgattctagagtactttgtccacttactccgtagctacggtatgatggcttgcaggtgtctggcagttccaaggggcatgtttcaacggattgagttgtgaggcttgaaacctagccagtctacctcatagcggcacgaacagattcatatgggcataaacaacatagtacatacctagcttacctctcaagttcaaacacctgcgcagtcgtaagtcggaattcaaatctccggctctatcatccctatagcattataataggccaatgataggaaaacaaatccgcattccaaatcaagacctaatgcgccaaaatactccgtcgttggtttcgatactgtatctgcatggccgctctgcagatcagtccatttcgactccgtcgtctccaccggcctgggttatttgaagttgggcctccacctttgcactctatttacgcacggagtagatacggagtaggcagtgcgccacacctggacagacccagtgtggcttttttatgaacccttatgtgtaggcacatcgtttcgttagtcacagatcggcagtcgcaagctgaccagaggcattattattgctagtgtgtggccgtcgcagcagggtcttcccatccccaagtccccgtagaaaaatccacccttcttcgattccccttgtggcccactccggtatagaactggaggcaaaactggacaagcttgccaaccgtacaatccggggccagccgttgggtccatctatagggtatttcatcctgtttccgtggccaatgaccttgacagagctgaccctagccagggcgcggaaaacatgtccaggcgatcgccagaggaaccagagtatgcccattatgctatgatctacatagatagcgatggcaatctgtgccaaagggcctccgattccatttcagagagccgccagactatcctctcccctagggtcaccagtgaattcctccgagcggtggcgatgtcgagagaagcccaggcaacccgatgtcaaggcaagtgctcttttgaccccacatgaatgtcctattgacgtagaacagtttctcccgaggtcccggtgcggtctagcgggcccccgtttaacaaccacagctctgccccgtcgcagggggagcccgtggcttatagtggaatgtgcctgagtagccaacagcggatacaagttcctgtgcaatcagagtctacatttcacccgaccatgtggccaaccgaatcctggcctgtacaagcctcacagcccaagaagaactttgcaggtcggaacctcaccttggctgcacaccagaaagccttaatctctgtaaaagagagaggtctgttgcgtctctactatgagaaaatcttccaaaacctgcaacaaacaaactgtcgaataatagccaaggcctacatcaaattagtcgagccgcgcaagcaggtgaactatccatacaatggacggaagattgtcgaaggcagaactcaacagcttgacccagaggcaactaagccaccgtggtggccgcgtggagtgagccatagggagccggatcatcttccaaaagttggtaagacacaaatatcattccggatgtcctaccaagctgataggagtcagaacgcattcgacttttggtatacatgctctgcgagatgcgcgaatcgcatggaatcacaaccgccagattaaaacaatgcgatcagcccatccgtcgtcagatcctgccggtcgagcggctacaaatcctggatgaggcatatcgagttcgcgaggaagaggaaaaattcctggatggaatttcaggtacatactccctcgcattactcctcaatccccttctcacatgtatctagagggaaaacaagtgtgcatagctcgcaccaatcttcctcatatggcagaggacacatccagcgaacaaagctcgccaaccgaacccgtctcttcccagaatatcgagtccgagtgcagcgacggcatcttcggaatcgatataaccaaagtcaccaccggagacctgccgagcgcgtcagcgtacaatccccccaatccttatagcccgatgcacctgggcgccagcagccaataccattccgtcagcccctccaacatgtcaacatcaccattggaattgaggccaaagcacgaatcactgtctgccgggactcatttgattgatcggacgcgctccatcagcatggcccactacccatatcccggcgtttctggcattcaatcggccccgatggacttttacggtacccctaatatgccccaggatgcaggtgttccaatcactcagacatcgacggaaaacttgtcaacagagtcaatgatgccatacggccacccttattatttcaactattgagcgtctaagcatggaccggagcatggaggatatctttttacgataatgaatttcgttcgggttgtattggaacaagacagctctgtccgaataattatttacgagtaagcccgaggcgatgcctctaaagatcaccagttgaacctgtaaccgatgagccgagttaaaatccagggatagatacaaaaagatgggtagaggccggcctttttcccattcgattgccctgatatgcctataggcactgcgagtaccagtcattggagtatttacaggttccacttgtgcaagttgtgcttccagtccagcccaacccaccacactgaccatagagagggacaccagtagtgctaccagagctggtagtcgtggtggtagcagaggtagtcgtggtggtagcagaggtagtcgtggtggtagcagaggtagtcgtgctggtaacggtagccgtagaggaagtggaagtaccagaagctgtaccacccaaagcagccaagataccatcataagccggcttcttcaccagattcgcatcccaaggacacgcagcaccctgaccagagaatgtactaggaacccacgagtacttgtccgtgtagtcccaaatagtaacgcccacacacttagcatttgccacacaagccgcaacggtgttctggtaatcggtcgactgctgcgcaagcagggccgaagtcgacgggagagtcatccggatatcaagctcagtataggcaacttcgacgcccagggccgtgaacgcggccagattggtagtctgcgcgctctggctaggggtacttccgacgataaaatgtgcttgtagaccgacaccgtcaatcttggcgccgtactgctgtaccagcttgacgattctctgggcacctgttgccttggacccggcggattcgatgttgtagtcgttgtagtagagcttggcgtctgggtctgcggcggctgctgtagcgaatgcgatgggaaggtatgcctcgccgatgtattggtagaagacgttgtcacggtaggtgccgtcctcgttgagagctagtagtccataaattaagcgacttgtgatgatatgattcgttcctagttcggcactgaccttcgttggcaacatcccaagcatagcatttgcctttgtagtgagttaccacgttggtgatgtggttcttcatggcggcaagcagagtcgcgttcgtccaggagccgcttgagactggttatcattagatggatattcccgcattgaaagacacgagataacagaacttaccccaactgggcaactggctataccaaaccagagtatggcatcgcagcttttggccattcgtagcagcgaggttggcaatgacatctcctttggtataggaaaaggtgttctgagacggttcggttgcatcccactagcgacgattagcgatgtttgaatattacgctaagaccagcccaaccttctgcgcattaccgggtgtaatctgtccaaagtcgtctgtgttgctcagctgggcaaggtatgcggtatccgtcaactcggagttatcagtagctgatccgaagtatagctttccctttgcgacagcagcggtgttcaatccggatgcattggtcctattgagaatgggcattagtcactatcaactgccaccgtgctgggaattggaagatcaaccatacagctgaggaagaacactggccagtgccagggcaatagtggagaagtgaaccatgacgaggtaatcaacgccaataatgaattgaccgcaagttctggacctggagagagaaatcgaagggtcgagctccttttattaccagagataaacagcgtcaaattggccgggtcttggaggttttcaggacctccggcgctaggtttcacattagaccaccttgtcaactcgaacgggccgaaaggccgtggcatagttgccgcggccgtttcaaacagtcaaatgggcttggccattgctgagatgctggatgagcatgagttatgcacggaattcgttactttagcccgggaaactgacacgggacccgacgccacatagtgggcaggggagagaaacgaatagggagacggcggagcaaattccgtatttccttcacggcaaaaaggggcttttttccatattcttggagggaagaggagaccgggtaaatgcgattttctacaaatccgggggatcttcaaggctgtcgatcaattcttcttctcttctccgggtaaatcttgactactaacctaaaagtgcgaatagtcagatcagaatcagcttgataattcaggctgagcaggtttccccattgcgcattcaggtcagacacgattcaaacaatggctacgatcgacctgttggattgcaaccttggaaagaccttttgcttagaaagggggcgttgccgcctcaatgatatctataagatctgaaaatgcatatatacacacaagactggcgcttttgaggggtatcagagattttataacgtcatgttgctccgtggtcggaccagagctgagcgttgcgagtggtgaggcactgttccagccaaacccagaccaacaggtcgataggcaggaagcagcgctcccatgggtgtgatgactttatggacgcagattccatagaaatcaacggatcggttgaaagttgagtggtaggtttcatattagtgagatactactcagccagtcttccgagccttcatctctgcaatgtatttcccggtcttggagataggcacgacgtggatggtgacaagctcatccacaacctcgaccttgccaccagagagaatctgcaataaaggcagcttcttgccagccttgatcaaaccaccggagacagtctgcatgaagcattcaacaccttcgacggtgtactccttcttcttgtcccaaggaagggggaagatgtaactcaggtggtcctcgatagcgttcatctcagaaaatgccttgacaaagtctgactgggcgtccatggggtaaaggaaaacgaccgggaactcgattgtgctctcgggtgaaaggggatcagggacgaggcggatcccggcatcttctatatcaggaggttgagcggttttgcgagttctgatctgacgggcgcgcagagctgcgctgagaaccatattctgcttgcgcaccctttcttcttcggccttcttcctcgcggcagcacgctccaatagggccttgcgctcggcaatctttttggcagattctagaagagctttactttctgggtcaattgccaatcctcgggctgcagaatcttccgcctcggccactttgtccaacttgaggagtgccaaggaggagcgatagaaggccttcacgtttttggggtttaacttgagggtggaagcgcagtcgagggtacaggaacggtagtttcctgcaaatgatattagtcaatgtgccatgcaaccaagaggataagacatgcctaattccaagttgcacaatgcccggttgatatacgacgcctcttccaacttgcgcaacagcgccgcctcttcctcgaaatcttcgggcgcttcccacttattctccttggcattaatgacagcaagagcctttgtgtagaactctttggcgtcaatccacttgagtccctgcacagcttcatttccttgtcctttgaagctattcgcaacctcccccctggtaccttcgttttgtagagcctgaagagcatccaagagcacgttttcaccctctatgaacccatatatgttagccgaatcgaacaaccatgttcaaggaatggttggacgtactctcgtcacccgctttgtcaatatcggtcatgaacagaggcgtcttattcatcattgccatcaactcctctgacgaatgcgactgaatggctgcaatagccggcggaagttctggtgcattgggatcggtattgcgcgccttcagtgcttcctcgttgatcgggaagggagtttcgtttgcagcgaaggcgtcaaacccgggcacgggtacgccctgggtaacctcaggaggcgccttgttgaggttgagcgactcatcaaagtcatctggaagttcttcgacgcgcgacatcttgagcgttggtcacaagaaaatgttgcgcttaatttggtgatcgtccaatgcttagaaactatgcccgcgatgcaaacagtgcaaacaggaggggtttgatcagccctaagccctattaccggattagtcggactggaatgggatgcaagaatatcaaacttgcgaagaagaagaaaacaaaaagatgataggaagattttgggtttacaatcaggatattccgtgatgcactgggtgtttctaggtcgatgaccgcacgtggagagggcctgaggccgccattcttcatactctatcaatctatcaatttgctgctgttgggttatatttcatgatctatatacttgattcactattggctggttctatcggagttttctcatagcggggaacaaggcatataccacaccgtttgatgcatgaggaactagtatactaggcaatgactacaacccaggcagtgtcggacacctactatacaggcctgatcgtgtgtactaatccccgcaactgacagcctgcagaaagttaaagcaaccctccttattccggcgacaaacctccgcacctcggaggccatgtcatcggtgaaaccccgaccagaacaaaccccgcatcaatcgggttgaagaccgaaccgattcaggccgtataagtccaggtgctaggttacgagaataatctgatctaccccagatattttcatgtaataacatacaccacatcaccatggccaaaaacttcaacatcctcatcctacccggcgatggcatcggccctgagatcatggccgaagccgtgaaggtcctcaagttctttgagactccccagcgcaagttcgaactgcgccaggagttgattggaggttgcagcattgacgctcatggcaagtctgtgaccgaagaagtcaagcaggcagctctggactcagatgcagtgctcttcgccgcagttgggggcccgaaatgggacaatcaacgtcgtggtcttgatgggcccgaaggaggactactccaagtccgaaaggctatggatatatatgcaaacttacgcccgtgctcttccacctcgccaagtgcctctatcgccaaggagttcagcccgttcaagcaggaggttattgaaggtgttgattttgttgttgtgcgggagaactgcggaggtgcctattttggccgcaaggtcgaagaagaaacatacggtgggttgcactgagattatattgtcattgaatagctaacttttcttctaccacagcaatggatgaatggggttactccgaagccgagatccagcgaatcactcgtctatccgccgaagtagcactgcgacacaatcccccttggcctgtgatctcactagacaaggcgaatgtactagcttcttcgcgactctggcgccgggtagtggaaaagactatggcggccgaatacccgcaagtgaaattggtgcaccagcttgccgactccgcgtcattgattctggcaacgaacccgcgatccctgaatggcgttatcctggccgacaacaccttcggcgacatgatctctgatcaagctgggtcgattgtgggtacgctgggtgtattgccaagtgccagtctcaacggtctgcctggtgataagacactgaagacacgaccttacgggctgtacgagcctacacatggatctgctccgacgtaagtgctagaaatatgataagaaagctgttctgactttgttatagtattgcgggacaaaacattgccaacccggttgcaatgatcctctgcgtcgcgcttatgttccgatactctttgagcatggaagatgaggctcgacgtgtggaggatgcggtgcgtaaagtgttggattcagggattcggacgcctgaccttgggggcaaggctgggactaacgaagtgggcgatgcgattgtgtctgcactatagtataagatatgggaatgactatccatgattgtttggtcaaacaaagtctaagcatgtgtcaaactggctgatcaatgaatgcaaatcacctctaactttgataaagatagaagctgaccaaaggcaatgtttgttagatactggcgttgaaaggaaattagatagtactttccatgattccataatgcttaggtataataattagattggtatgttcctagatatttctcattcttcttctcttcttattcctctccatgtctaataccatcacttccacacccccacagagtccgctccaaggcgagtctcccacaagaaacggagtactcaacatgtcacccccaacgcctaccactccattgacaccaccaatggcaccccgacatccaagccagcatcaaaacacaccaggatcctgcgctctacgcctcgaaaacctggcacaacaaacctccaccgcaaaaagcgagctgatgacatccgtcgcggcagacatctgcgcaacattcataagcatcgcaaagtattccgaggaaggcacacttcaagcgcgacacaccgacgtgatcgacaaggtgattcagacgattcgcgataccgatgtgaagcagcgacgcttgctggatcgacaggtgcaacgactgcgcaaggagaggaagtggatccggaagaagtattcgcggctggctgtgcaggcggatgggctgggtcgcgcctaccagatgaagatgcggaaattgagaatctcactacaagaggcgcagggggaggtggtgcgtctacgaattgagcgggatatgttgcgagactgctttaagaagtacaatattgaggacagttattcgaatgacaatgacaatgtcgacgggaagtgtgaggttgacacgggggaggatgttgatggagaatatgagagtgcagaagaaactgtcaagggggcagacctttgatacctctcagatgtcttccaaggcgtctctgggatgtctctcggagattatttgtccgtttgagcttgcatgcgaaaccgttttcatatttcctttgtctggccctgggttttaggggagaagagatctgcctcctatttcgaaaaatgacgccacggcgaagacaatcatgttcattctgagacttggcttcgtcaattttcccacatgacagcagtacaaaatcaagaagcaagttctatcaaaaaagactctcatttcaactgcgtttgaaaataccacagtaatggatgtaagcatcggatttgcctatcaatattagtgtcatatctcaatatcggcttctgagttccgagggttggatccgcatttgatgacatctggaatgtgattctatatcctccagggcttgttccagttgaatataagacgacaatcactggaaatgggaatctcgaccatcagaaccgagagaaccagacgtcggaacttgcaaatcgaaatcacagccgatcatgagcaagtcaacggtcgtccaaatcctacctcggcatcttcaataggcgcaccctgattcggcccgcggatccaccgacttccatgtggaaagtccggggggctctttttttctgttcgtttctccttcttttcggttctttttctcttttctctccctgatcaaaatcctcttacttaaaactcttcgaatcacctcgaagacgacgttgagtttgtccaatttcttcccgataaacataccccggaccgcgttatcggccgatacccagaatgagcacccacgactatgacgccgtccgcaaggacatcgccgatatcctgcagaagcccggctatgatgatggcagcgcaggacccgtcttcgtgcggctagcatggtaagtaaatgtgatcaagcctcatcgtttcccggtcggggacctcggctcatcggggacgataagcctcgcaatcttactgacaatgatttcaaacaggcactcatctggcacgtacgatgttgaatccgacaccggtggctcaaacggagccggcatgcggtacgaagcagagggtggcgatcccgccaacgctggtctgcagcacggacgggcattcctagagccgattaaagagaagcacccctggatcacatactcggatctctggacgttggccggagtagtggcgatcaaggagctgggcggaccggatatcccctggcaaggtggacgaacagatttgataaacgacaccaagctgcctccacgaggacgtctgccagatggagcccaaggtgccgaccacctgcggttcatcttctaccgcatgggattcaacgaccaggagattgtagcgctgacgggcggacacaacctgggccgatgccacggcgaccgcagtggattcgagggcccgtgggttacgaacccgacccgattctcaaactctttcttcaaattgctgctccagcttgactggcaacctcgcaaggtggcgtcgggtaatacccagtttgtgtacgtggaccccgatgcggatgaggacgaggagccgttgatgatgctgcccactgatatggcgctcatgacggatcctgcatttgccccgtgggttaagcggtacgccaaggataaggagttgttctttgatcacttctccaaggtgtttgccaagttgattgaactgggcatccggcgtgatgctcagggtgccgtgaccaacactgacggcactctcggtggatatgtgtcagcgccgaagaagagcaacactgccacaggcccgcccagggcacgtctgtagggttttattttttggctttgtttttggcttgtttttgatcaattccccactgcgttggttgatccgggactgcagactgcaggattcggatgtgtaaatagatcctagatcatagaatgtgatgaagataactgatggatgcctgttgatatgtatcgtcgtagtatcttcgtagtggaattataaggatgaaatagaaagaagagagaaaggggaatgttgaagtctggggtaagattgcggggaagcccacacggctatatctgaataatactacatatacagactggtatgggcatatacgatgtagacttattattatgtagtaaagaagtacttatgactgtaaaaaggcactagaaaggtaccaagcgtgtaatatctcgtgttatacaaagtcgggcctcgggtatatcaaatgagagcccgctgattggcagatgccgtgttgactagtatcaacggtgtatattaggaaatataaaagaacaaaagagtacaataagtcacataaatcacataaatcacataaatcaaggcaaatctgcatcatctgcatcactgtcaccaggcttccatgttggatcggtgttcttcttcctcgaattcctcaatcctggtcttcttgataccttcggcctctcctctcgctgtttcttctgttcttccttttctctttgctgtttatactgttcctctttagtccagctcgagtctttctcccgtaattcacctttattttgttgttttttctttggatcgagctctttctgctcttgctttttccgtccctctcttctttttcgatcgtggccctgtttcttttgcatattctctcgatcgagttcctcctcttcttcctcgtcttctacgtcactaaatctctggcttgagttgaattcacctgcacgtagggcctgcttctcccttggactcagggcctgcttcgaaatagcgtagtttgtcatcgccgacctcttgagctcattaccgtgagtaatgcggaaatgtcgatttcgaagctcaggaatagtctccgcatctggcatgctaatatctgacgacccagtgcccctgcgattgcccagctggggtgacataggcagatcagggaagtccaaagctccttcctcactaggtagacccgaaggccacatgtcaggatgttgaagccagcgtggactctgcatcatcgactggaatatatggttcttgggatccacatttattatgccttgaccattgctcgataggtcatgaaggcctgtcatgtccataaacgaggacaactcgaactctggagctgtggtggtggaataaaggtccggatcaaggagtgattggtcgatgaccagtggatcaagaagcgccgaatcaatgtgaccaagtggcagagcggatatggcagtctctccggcggctgggttgggggatacttttgctgttgcccagccgggattgaaattgctgaagcgctcaccattgtatgatagtatacgaggccatgactcccgctgcggtggaggatccgatcgctcccaagggatgtgttcttcgaaaacgctcttgttctcgctcacgcaattggccatctctatcaacgtgttgttggccttgtgcaaaagttcgatggtgggattcatgattcgctcgtagaaaaggagcggaatggcataatggttgacccattcagtgggcactttttcgtcaggctgaaatgctgggattccaccgatgagaaccccagagttgacttggctgtcgtacatcataatattcccattatctttctcgcctcgtttcgtatctgtccagaataaacgagcatgggattcgttgttatagattccaccaatccaacgatagtgtgcaacctgtggcttgtcttcatagtctatgtaattgaatttgagattctctgtgtgatttcggattcgagtcttgatatcagaggttaccacaagacgcagagggagttgaccgatctttcgttctccagtaactcccgtcggatcaccacacttatcacacttgaaagatttgcgtgggtagaaacatcgctcgatcaactcttgcaactctactcctttttcatcgcccgtttggtagccaggtagaatgcaggacccttggtgggagttgtagaatggcattgcacactgacatttgcaaggggtcactcgttccacgtggaaatagcgaaattgagcgaagcttctcgtggccactgaccataccgcccaaggaggaatcggttgtcccattttcaagccggttgagctatcggaaaacatacggagccactcgtcacgcacaaatatagaagttttatcgtcgaaggtctcccaactcgccattatcacttcgatgaatgctttttcgatatctttgaactcagctgctcgattgtttgcacgatctatcttggtacagccagcatcgagtagcattcccgctacaataacagcatctgttgcacaagacattgaatcccagatagggccgcggccccggaccggatatatagtgccattcggatcccaatcaaaggtcaatggggacaacttgacacttgccgtggtggggaatgacccaagtttcatcgtgagcatatccttgtaagaataggctgtcccgtggcgaataggtttcccagtagacggaatgctgggatcacggtccaaatctgcatacacgatctgcatcacagttcgttccatggcgtctgtaatcgcttgcgtgtcaagcgggatggaagctttcgggacaatggggctcagttggtgccttccaattggggtcactttatcggaaggtgccagagcaggcgtccaggtgaaagttgtgatttcatcagcagcaaagacaggctcttggtatgccgaagtggggtaatgaaagtgatctctgtcagcaggagcaccgggtgaaatttgtcttgcgcgcttgctacggggttcctcgttgtcctctgcactccgtttttgacctggtgcagggcccggtatcttctgactcggcgcttcggtcaataaataggccggtgtaatctcgactcctgggttcatgtgttgcaacaagctcatacgaaggatttcctcctgttgcacagcgagtgttgacgctggagatggtggaggtggtgtgtgtaagctgtcgacggagtacataaactgttgaataagatagtcgggcatatctggtggcgcatcctgagggcgtatgtatgcattcaagataactgtgttcacatccgggagagaattgtaccacctactgaatggctttgggcgcggatcgaggtcgtatctcaagagtcgtggcccagtatctcggttaacatcgagcatatctgcccaagtcttcggacgatggcgttcttgcatgtagtagatgagcttgaacaaaaacatatgttggagcttgacatttgacttctttctcattgtcatgggagtcttagtcggttcctcatagtggattccccagaagtaatgcttcatcaacacttgcacctgcggggccttcaaggaacgactggaaccatgtgcaacagatgaaaacttggtattgaaatgtgaccagtcgtcgggtgggttaggaaggcgtgtaaagtcgtaaagtggtaagggtggaggcggctgttcgagctcctgcggcctcaatgggaaatcggaaaagagaggaatctcgagcggggagaaattactcatctcgacaatctgaaagtgaagaatcaaagtctgaaaagtataccacgacgggctcaatcgagagcaatatcctgatattggggtgtcctatattggtctgaggaatttggaaactatcaactagaggccaaaacgaggaaaaccaagtgctttaatggacaacgaggaacatccattgtccaatgtgccggcatgaatgccatatttatcaaggaaagaaatagagtgccatattgtagacggtaagcatgagatgaaagaacacatcgagcctctccccgaatcgaaaacccatggtaacatcctctttcttgatgaacaaagcacttagaatcgaggcaagagttagcaccagggcagcatgagagtggggaattctatatttgtcacactagcacatagcgtcttggtcgaggtcaatcaaagaacctagtaaaaatagaaagtaatactattaatggcagtgggattatggggatctcttaacaaaccaaagaacataacttatcaaatcgaagatcctatagattggggttccagatccagtgcaggtaatggatgttgtggcatgttgatctcttgtttggccttgagtaaacctcactgggtctagaaataaccatcaaagtgcagaagtgattagtatcgagctagagatatcgaacttcataaagcaagtgaatcggagcttctggcatcgtccgccacgaataaagatatgagctaaagcatgtacgggcctgcgggtagccaatccatagacttaagaaacgcgaaataaaaacttaaatcaaagagatgacagtgccacaaagtaaaccaatgtatgaacctcatgaagggttactcgaagcacaaagagacactttgacagtggctgatcactccaggaattgggttcgtcactgtttcatgtcgaggaaaacaaagccgtctggtcagggctgcaggtaaaatacgtgtaaataacacggcagattacccgaatgtaacaccgaaattaacagtcatgtgactgcacatgatctacattacgcactagccatattgggcctagtcccgaacaagcgagccctcgtccaaatcgggttagtgctccaattacccgatcccacaagcaaagtcactcagttggacttcctctctccatccctctgtcgacaacccatcgcgatcctcgcccatcgcccatcatgtgtacgtgacgaccccttctttcagtccgagagcattatatgatatacaaccacgaaattgccaaaaaaaagaaatgctggaaacgactgcagagatggcagttctcgaaattgaatgttggctaacatggcggtttctcgataacagcgctcgtgaccggcgataagacgaacttccagttcatcttgcgtctgctcaacaccaatgttgacggcaagcagaagatcatgtacgcgctgacccagatcaagggtgtcggtcgccgttactccaacctggtctgcaagaaggccgatgtcgacctcaccaagcggtacgttcgccacaatccctatcgaatattcaatcattcccatgcatcatctgttattggagggaaaactcgaaagagacaatggaacagtctggaccggaatcgacctgcggactaaaaagagggggaatatcgcacaacaaacaaattttctacaagaccagcaaagctgacaaaacgccttctatagtgctggtgagctcaccaccgaagagctcgagcgcatcgtgaccatcctccagacccctacccagtacaagatcccttcgtggttcctcaacagacagcgcgacatcaccgatggcaaggacacccaggttgtttccaacggtctcgactccaagctccgtgaggatctcgagcgcctcaagaagatccgctcccaccgtggtctgcgtcactactggggcctccgtgtccgtggtcaacacaccaagaccactggccgccgcggtcgcaccgtcggtgtcagcaagaagaagggctaaatcattctgttcgcttttttgccgggggttcttggagggattccgttatttccggtgtgtttctatggacactcgtgggaccttttccccgctgtcaaaaaattgaaaatgaactataccaatgaaatgaaccgatcttttcaatacgtatgctttgcttttagccctgggtttgatgggtcatactttgtggaacaatttgccaactccatgatcctggctcaatcctcggccctcgtagggtagaatatcttgcaagcctccgtggtataattcgaagaatacctttctgtgggggtagaaagtcctagaccgtcggtgtgcctgagccataggtcaacaactatggggttctggggttatacctgcactcatgcatcatccatgcctacactacatgtttattactcaatgtttgagtctatccaaaatttattgaattcaaagttgcctagttatataccaaacaaaagccaaatcggtaggaaaacatagtatgcggccttctgaatttcccagagggttaggtgtcaaattgtacgcaaacagccagtggcaagatcaataacacgtagtgtaatgataagttcatcaacgcattgtatcatatagcagctcggttgagtgtttagaaccactcaccaccgagccagcggttgaagaaatcgatactagcctcaggctggtccatgggaaccatgtggccagcaccgaagatacgcatgaaggtgaagttgccatgggacttgatctgaccgatattcttgccaacgtgctcgttctgtacaatcttgaggtcctcaagcttggcggcagcgaactccttctggccaggccactcaagagcctcggaccaggccttgttgccaagccagttgcagatgaagtcagcatcaccagcgtagatcagaacagggatctgctcaaggagaccgggcacgaggcggtggtaaggcttgaaccaatcgccgttgaagaggaagttacggttaatgtcgaagttgcatgagtcgtagccatcgacctcagcaccgacggcctcacgcacgctctcctgaccgaggtactcgctgacgtagcccatacccttgtagcacaggttgctctcgtcctcacacttgccgcgaatatcgtaaacattctggccggtgcgctggtagggaccaagcatggcgttgttgcagtagatggaggccgggacacaaacccaggggctctcgctgttgtagcaggactgaatcatgctttggcagcgggccagggagttatccatggactggcaggtgctctcatccagaacagcggggtagccaccctcgccgcatgccatagggcggtagtactcgtactgagtaagaccgtcggtgagaccgttaccaatgagaacagacttgaggttgatgttacgcttcttgtgggagagaatctccgaagccatgacaggaatatagtggccagcgtaagattcgccagcaatgtggaagtcctgtacagcgtactcggggaattgcttgaagaacaatgtgaggagggcatagacgtccttgccagcagcaacagtgtcactgacagaggagccactgtaggagtagccgacattgatgggctggtccaggaagatcacagaggcattgttgttccacgagaaatcattgtaaataggcttgatatcagcaccgatagagctgggtccaagttccaagaaaagtccggtgagagacgagcagccgggaccgccgttcagccacaggataacggggtcgttcttggggtcattgcgagactcgaagaaccctttcggaggttagatcaactttagatgatgaatggaggctttccgaacttacagtagaacaagtgcttgtcattctcgttgtcatccaggtaaccactgtactgcttcacaccggggtcgatgccgagagcgctggggtcaaccttcttggcacggaggctgtagtcctccagcttgccctcaacctcacgctccttgacgccctcggcattagagacccagatgtcttggacttcagcgccactgacatggtaatcccagtgcgagtcagggcggcgggtgtgcttcttgggcagggaaagcaagggagcgctctccatggactcggggaagtagttagacacttcctcccagagctgacgagcctcaccagaaagagacttgaactggtcctggaggtgctgcaggggcttgagtgcatccgcaccctgttgggctacgttctccgcatactccctgtgagctccgaggacctgctggaagggcggagcagcggccgaagcagctcccaccaagagagtggcggacaggactctcattgtgtactgtgtttggatttcacagcaagaatgatggtaatgagctggtgatgatgaacgggtaccttggggtctggagttaggcacctcttatcagtaaccgttgggagaatggctctcaaaatgagccaaaggaagttgatcacttacaatttgaagataccacaagatgattgataattgagacaaagttgaagggttggaagaagcaagacggtgatgccttggggcttgtgagatgaggagaagcaggtcccttggccgatgacgccggggacagtcgataagacgagagggctgggccaatcagatgaccccaggaagctgcccgaccccatgacccggatgagtcagcgtgagtcacgggattccaaggctacgaggggcacgagcttttcgactaagcctttttgggtaaattgcctgacgcaaatcaacttttgatacttcggactcagtctacatatatccttcgatcttgacggtgccatccacttggaaacagtattcaaaaatatatcttgaatcttactacattttctggtgtctgttttttctcttactgaagcaaccagccctcagcggctttcacacccaaaatgcctatcaaccaaccctccaaccagatcaaattcaccaatgtatcggtggtccgactaaagaagggtacacttctatcttacctatgttccttggacgtttctaaccttttatcctaatccaggcaagaagcgctttgaactcgcctgttacaagaacaaactgctggaataccgatccggcgccgaaaaagatctcgacaatgtcctccaagtcccaaccgtgttcctctccgtctccaaagcacaaacagccccaacagcagagctagcaaaggccttcgggaccggtaccccacgagaggaaatcctccaagagatcctccgtaaaggcgaagtgcaagtcggcgagcgtgagcgcaaagacatcctcgagcgagtggagaaggaagtgctggatatcgtgtcaggtcgactagtcgacccctcaaccaagcgcgtgtacacctctggaatgatccacaaagcgttggatcaattaacctcggccagcggacaacaacaggcacattcgagcggggaggtgaatggagatggcgaggagaaaccctctcagccgaagaagccgctctggacgggagtttcggcgaaccgctcggcgaagagtcaagcgttggatgccatgaaggctctcatcgcctggcagccgatccccgttatgcgagcccgcatgcgtcttcgtgtgacatgtccagtgtccctgctgaagcagtctgtcaaggctgccccaggtgcagcatcgaataaggagaaggaagccccatctagtggctcaaagaacaacaagaaagggaataagggatcgaagaaatctaagaaggacgattcagatattgaggctggtcagtctgatgtggaagcacccaaggccccgggcaccgtcaaggacaaaatcatggcgttcatcgaatcagttgaatcgcaagaagtcattggcggggatgagtgggaaattgttgggtttgctgaacccggtgcgttcaagggattgaacgagttggtgagcaatgaaacccgcggaagaggccgggttgaggttctggacatgtcggtcacacatgaggattgaattatgacgtttgatttctctaaggctttactgtacatgatacgatatgactgatgacaaaaagtaaaaagaaccttgaaatatactggatttgatatgccatcacattctgccgcagtaaggggaatacaatgccgatgaccaaagtcttttctcacggaaaaagcaaagatgaagaaatgacagtcgaacaatggagacatactgcggggaaggaacacatactgcagctgccagcagctcgtaaaaacagccactcaacgtaggagagtatctttgcaaaaagaaagaaaagggccaggatctcaagtatgatagctcaaagtataatcaacagccctgaagcggcgtatcattgactcgcaacaagaaattaagtaacaatatgatacaagaacacgtctaggatatagacaaaggagagtagaaaccccaacaccgtgagaattgcttattcccaacaaaaagaaaaaagcaatcactgatcatcgcaacgttcgagccaatcagacatcttcaggtacgccgatcttgtcacatccagtcaccagtaaaaccacattcttgcccgggccaagttctctagcgagatccagtgtcttggctactgcatgactcgagtcaagaccgggcaaaatgccctcgtggcgctgaaggattctaaacccatccagggcaaccgcgtccgtagcagttgagatttcaatccggccagagtccttccaatgggcgacctcggggcccacagtagacaagttcatgtcaggtgaaatggaatgcgaatcaagtatttggccatcgtcgttttggagcaggagagtgcgggcaccttgtagtaccccaagtcctccatctgtcagggtagctgccttcgcggcttccacaccaatcagacgaatatatgagtcatggaggaacggtctgaagagaccgattgcaccgctaccactgccgacggcggtgacgagggcatctgggtgacaacctactgcctcgtgcatttgggctgcaacctcctcgcctagaagggcttggaacgtgcgagccagagtcggcaggggactaggccccaccgggctacccatgaggtaatatgcagattcgtgattgcagaccgcataccgcagggcttctgtgatggctgcgcgtagactacccatgccggagggggtgcgggccgtcaggaccttagcaccgagcgatttcatctcgagcacgtcctcttcctgggcactagcgtcgtctgcaccaatgacaaccacacatcgtaatcccagacgcgcgcacattgcagcagtgaatttgccatgcttggccgaggcacaatctgtgacgatctcagagcggcccattcggcgagctagcaggacctggccaattatgttgcgggttttgtgactaccatattcatttttgtcctcacgcttcagccagatagtagcacctcctgctaaattggtcaagttcccagccatgtgcagtggtgtggcacgagcacgttgaaacgtggcatattcttcccagaacgaagggtctgagacagcggcctcgaagaatgatgtcagctcgtataggaatcccattatggattcaggagcaaaccggcccccgtaggagccatagccatcaaaggtgatctgcggggcccgcagagtgccatctgactgcaggatgggggtatacgctgtgattgtgttcaatctcgatgtggagatagacttggcaggtgtatcggggagcgtggatgtggttccggtgacagttgatactgtcgttgctctggtttcgctatctgaggcatttgtcgactcggtttgtgtgctactatcacaactcgagggggaaaccgaacggtttctggactgtacactgctaaccccttccgggcagggattagcaattcgtgcttgagcaatcgttctgccagcaggtctcaagtgaatgagatcttccacattgtccgtgccatgtgttgcgagatcagtgggatcagctgatttgggagaggaaaagcaaagaaaacggcgcagagagcgaagcatgttgtgctttacccttcggataaaagtagaagctggattgatgttttagtaagtgattgacaaataatcatagagccataaaaaataaagagaatggatttgaggttcgactattcagatcattcagatagaagttagggcacggtacagtgggcgaaaggtgcattaagtatgcatttagatatagtgtgaacgttcctgccttatgtcgacctttcagctcgtcaggcgaatgaatcggaaagttcgatctcggattgcctttcttggccgactaggttatctgaccggctcttctacttctttcacttatgagtggagtacatatggcccgtattgtgaggttacgtagtggagcggtagaaaagtatgaacaaatataaccgagtgccaatgtcattgaatctattcagatggagtatatagtggaagatttgcctcattcctgtatatcatagaactatgtagactcggagaaaaggtatccatatagttctggttccccgagttaaacagcttcctatttgattgctttgtctgaaagattgctatccagaacttagcaaccaggttaaatactctgtacatacagggtaccgagaacttcaaacatcattccaaataagcaaaatccttctatttgcaatgaaccgcggcagtgccagcagtgtgactcaagcccaacgccaatgatgtgatcaagcctgacctagtatgatcagattccacatcttaatcgaggcgtgcaactgtacagggatgtagctcttaaaagatcaatgaaattggggcctccagggcagaatctcatatatgctgtgttacaacacccgcactcccagaatagtcttgtctgtttcacaaagtgagccttatctcaggtcaaatctaaatccacagcatgtaacattccagacaccgctccacgtgtaccgtttctcggtcctacattcaaatgactcggttcatataaaatgaggcattttacattctatggagtacagggctctgatctaagagacaaagacaaaatttgactacacttacgcccggaactgtccccggacatatgtcttttccccatcgatgagatgctcctatgccctcaattggcatatggatcggattcattcaaagatctctttcagccatatcttccattcaacaacacatccttttggaaatatttcaaagacaagctttcaacttttcagctaggacttcggaaattattgggaaatttactactctcaataaaaatggaatccactagctagtagctttatcgttggcatattgctttttgttctatgtgatccgatcctcgccatcacagcatgccaagcttacgcttattgattgatatcgatggtctaccaaactgaactgattccctagattcctgtactctacattgctcatgtgaataattcatagatcgacctagggcgaagctgatcatgtgatatacttaataggatgaacttcaaccaatgagtactcatcaaagaatttcttttcctttttcttcgttattgctttcttcgttattgctttcttctgatgtattattttatagagagctattggaactagccaaaaataaggttgtagaatttctatggtcggaatgtggattataatgtggatacagggatacttgggacgaatacttctggtacaaactcgaattagcaaaagcttcattaaacagtatgatgtattaatgcaagtcgcattaatacatgtaggtactagaagacactgcatcgaaaccatggactcaaggctcagtatggacaacaagcttcattaatacatatcaaggcctctgcatctacattttagagtgggaaacatggcgaggagagcgaaagcactgaagcattcaagcatatatcatacaggagccaattctcaaattttccattactatttcagtggatcctataacgaagaaaatctgcagttgtattgctacattacaccaaggggaaaagctgatactcaaaggctgatcattgatttgagcgtcaaaagttatacgtcagtcaagcgtcaaagaaacctttctaaccgttgctctctagattcaggatctcgatgagcgtttgatactgccggtcaagagattacgatcgcctgcacccgctccagctcttagactaatgtgttcttggtccaattgtttatcactttgacatgcattttaatcagaaaaaatcgtatattctacctaattcctatatgacttagctcctcaatgataaatcagttgatgatgattcataaagcagttcaaacgtcatatgatacaagtaacttaattttactaggagtttacatagaagttgcaggtatctactgtcttgtatttggagtttgaaacgaaagcggtgtctaaaactgtaaggcggtataggaagcggcagtaggcacaatccaaattaggaaggcggcgactgaattttcaggcaggatgggtcatatcaacacccataatattctatcacctcacctacttcattcgacaatctccacgaaaacggatatcacgaaaacgaatatattcgcggaaacgagcgtgtccgtgaaagtgagcatgcctatgaaaatgaaaatatccgcggtaactgcgtaaccgcgtacgccaacccccagactatataatatgctcttggtctacttctctaccacctcatctgcttcattcgataatgtccgctaaaacgagcatgtctgtgaaaacgagcatgtccgccaaaccgagggtgtccgccaagtgtccgccaaaatgaatatatccgcggcaactgcgtaaccgcgcacgccaacccgcagactataaaatatgttctcagtctacttccctactacttcacctgtttcattcgaaaacgtccgcggaaacgagtacgttcccgagaacgagcatacgcaatgaacaagtccgcgaaaacgaaaacgagcagtgtccgcgaaagaaagcatatccgtgaaaacgagcatatttgcaaaagcaagcaaattcgcgaaaagtggttcccggaagttcatcaccattgtatttcgcggatatcaccccgcgctaaagattatggaccgagcaatcctagccagagcaggaaagcatcctggaaacattccacgcctaactcataggtcggagagagggacgggcgagcaactggtaaattcactggatcctttgttcaaaggagttgctttctatggatattgagtactacaacaacgaccatcgctgcctcggtatgccttgtctcattgtcggaacgtgcgagatgatgctggagtacgcgcaagctcgtccagcaacgtggaggatgatactttggaattgaaataccgatgtcgggattgagagaacagaatgagcaagatggttctgcctttcatcgaggcatctctaacaacacggtctttatgacgcttagattcaaaatcttgtcccagattattcaagtttcaagcatgacgtccttgatcttcctaataacctcacacaagagtagaagcaaacttggaaacattgtctgttttcagcgacgtagatatcgaagtctgtgaatggatccccccgccaccccgatccaggcctgggtgacccgcggtcgacctgtgtagggcaacgaatagggcattgtgtattactctctaagtatttctcattcttagcgtatatatataggattgatctggaatccacaaactgtatgtccagattcaagaatatacggcaacactatagtggtattgtcgagttcctcactgtccctgccattcttcggcctattagatggaggacgtgattgggtgcaatcggaatagcatcacaagtgtaactactcgacaacgcacaagtcatccaccatacccactgaaactccatgaaaacccagccgatacgaatcacgaccagaatagagcgatgtgcgatcttggcgcgggggaaaagcttggctctaggcggggttggaagattcttctcgaacaactgcacgatcttagatctagagcgatccatctcgatcgtgcgttgtacctttttgactttaattgatttacgagagttatagttcaaaaaagcagagaaattgagttctagtaaggttatctccagcagcgttaaaattttctctagaccatctatgagagacattcgcgacgtgtatatcgtgataagagagcaatggctcgcgaagacaggggtggatgggttaaacccacccaaagcaaaaccgacagatcccaccgaaaaagggaaaaaaaaaagcaaaaatcaaaaatcaaacagccaaaatccgtaacgggtatacgcttagatgcaaatgcatgacaggtaaaaaaggaaagacagtcgctgaccgacagtcctcgacatctagtgaggagtgactcggtcgacgatggggttcagggatggagatgcccgatcggcaaagccaaaaaaggtcgagtaaataagagacatcaagtcttgaggaatggaagggatgattcaaaaggaacaatctcctggatatgaagaaagtagggcgatattcaggcgcagacctggatagcgatcagggcacgggcgagatcctctggggcaaaagggaggtccttccgggcggacatgacgcacggggtcatggcaggcgagatagcccggacgagaggtgatgaatagcggacggactccttgaggaagaacttgggctctctgacatcctctgggatctcgtagatggagccctcgttggtgagggtcatcattgagccattgtagctggaggagttgacgatggtggaagactgggagccggagttgggggcgcgtggcgaagattctgcagggacctcaggaagggcatcgactatgagatagaagttagaattaattttttctaatagggctgggtgatttcgattagggctggggatgcgtacctggatcgacattgtccggggacaccgaaaagtcagtatcggaagggccggagtagccgtcagacacttcaaaagtggtacaaggtgagacggagtcgtcgaatgaacgagtccgttcgaccattgcaccctggaaggaccaagcggctaggctcttctggtgggcacgatcgaaaggaccacggaatttggacgggggacactcgtgtcgcctatagtattcgaccttgggctttccatcatttttggatctggagcggaacacccgcttgaccttctcgcggaagttcatattggaagaaaaaaagaattgggaactgggtattcaagatttcaaattcaagaagttcagagatcaatgcgggcggttcctaaggaaaatgcctcagaggtgcataccactcccggattgggaacggacgcggtgggtgtgcaagcacgaatagcgggggttgtgtgagagaaacagtttaaccattctatgaagatatagagacagggaaagggaaagtaaagcaaagggaaaaaaaggaaagtgaaagaggggagagagagggaaatgcgggaattatagtcgcaggcttatctttgccgttgcatccacgttcatgtcccaggtgggatggatgtcccggttccccagaagcgtctcctgtccagatgcggtatattggggggcaatggtccgtacggagtaataatggtggaatccactgtctgtgcgagagacatcattatctgctaattggtttggtacggggtattctatattcgaatgttctatatagttagggggatgttgtactccgtacacaactagttactccatactctaggtaagcgatttaatccccgattaattggtccgagaaatagccgagtctgggctgcgattctgcgaatgtcacggttactgctacactttagggctacccagcatacttacttctgacccccggtgtatatccccatggatgtatgtcgtaaatcaagtataatggaactggtcattccttgaagtcagtggcgtatattgtactgcagcgaaggcttccagaactcggtgagagcctcacggttacatcatgttacattttgcatgttgtaagaggatgtgtcatggaatctcaactgggcgcaggaataaaccggaatcggagtggagatgaacttgcgcagttgcccccactcggcacgtttttgccgggcttgcctgggaggcagcgctggctcataaagcacattaatttccatttcacaacgaggccggctggcccaatggcaaggcgcttgactacgaatcaagagattgcaggttcgatccctgcgtcggtcagtttttttcttttgttcaatttatatattttgtataacgtagttagataactagttaaacagtctgtttctgttgtcatttatctcttttttaaaatagttatacagtgtagatgtagagattacattggccttgattactagtttaggagagctgctcactcaactagtaattaccaagttgggtaactcttgaacgtttatgcatgtcatacaacccacccgtaactggcatattcacatctagtgggggtaccctttctgactcttccaagccatggaacttccatttactcatttcctattttgtgactgctatttttgtctttattgggatctgctgtttcagagatgatgtaatcgctatttggccctttcaccaagaatgcccaatccctgaggaactcagggactcaggaatattggcacacatactaagttaggctttgcgcctttccccagatcatccttgagccccctgattaccttgattgccctgactgctctgattgccctggtcggcccctagttgtgcaggcacaaccctatttacccgatgcagacgttagggctggcccaagctcacacgacaagggaactatgaaagagatgtcgcatgcggaggaatgcagagggaaagaggacaaaaagagacagacagacatagaagagagtcttccaatttgaattgaattgaatgcattgggatctaataatagttatgaatccgtagggaaaaaagagattaaatttgtgatactttgtgttccagaattgtcctcaccacggatccaacaaccctagagaagagaacataccgcgtcatcccttacttgacttcttccctcctacacttcactaccatcgtaagttgacttatctttccttcatcttccatcttctgaccagcgcagaatcaatacaatcaccatgggtaaaaaaagcggaaagaagaacaagaagggcagcaagcccgtcgcggccgtagagagcgccaaggacgtggtgtaagttgaaaaattcaacatgatgccacatcaccatctaaccgttcagtgaacccgagcaaaccgaaggccagactgcgaccgaacagactgcgcccgagactgcgacacagcctaccgagaccgtcgcggagcctagcaaggcgcccgaggccacccccgtgaccgaggccgcaacggagatcccagctgtcgcagagaccaaggatctggagaccaaggaggctgtgaaggccgagcaggctcccgcgacagagggtacggtggaggagaccgtggagaaagtgcaggcctccaaggccgggcagttgggcgagctggacgatggcgctaccgcaggcactggtatgacggcgtgttagtaatatgcgatgaattccgactaacctgaaatctgcagtccttccggagacgatcactagggagcccgcttccttggacgtcctgatcggcgctcctgcgacactggtcgagcgccccaagacctcagactcaaacgcccccgctgtcgctgcgcccgtgcctattgccgccccggccgagaccgacgccgcccacacgaagcgcccgtacgagaagcccatcttcaccaacgaggataacttgaagccccacaagatgcccaagaccgacgaggaggcgattcaggctagcgtggcggaggacaagaagaccattgagaccttggccggtgttggaccggctacggctgctgcgttgaccacccctgagcctgagcctgttcaggctgaggcacccaaggctgttgtggaacagaaggagactcctgtggttgttgaggcacccaaagtcgaggagaagaaggtggaggcacccaaggtcgcagaggagaagaaggtcgaggcacccaaggctgttgtggagcagaaggagactcctgtggttgttgaggcacccaaagtcgaggagaagaaggcggaggcacctaagaaggttgaggagaagaaggttgaggagaagaaggctgaggagaagaaggctgaggagaagatccccgtgtccactcacaagaccacccctgctcaggccggcgccccctcctctcccgtagcggtcgccgccgcgaacgctgccattctcgcttccaagggcgacaaggctgctgctccggccgccactccagttgtttccaaggaggccgagcccaagaagcccgaagctgccctgaagcgtggcgacgaggcacagcctgaggaggcgttgcccaaggccgaggagcctaagcccgagaccaagaccgaagctgtcaaggaggaggctgccaaggcccagcaagatactcacaagacctccgagtcaggatcgcaggccgagaagaagaagggcgggttcatgtcctggctgaagcgcaagttcaaataagtaaagtaattgtggagtgcgagagcctgtgtatgatcagtattgtacgctaggtggggatgttggggaggggggcttgcaacctacgtcaggctgccttggttttgtttttctttcttttgtcagctttgatgatacacccgttgaaattatatatcagatcagaattatagtgcttattatggtgtcttgccttggagtgaatgtagaaggaatattgtttcaagttgacttcgagtcgggcttggtgtcctcatgtagttactccgtacaccgctagtcaaatcaattctccaggtatttcccttccccctggcgaatcaatattccaatattccaagctcgtcattagcaggagcccactggttgcaaccaatgaaaacgacatcgcaacgcaacgtgaacactatctctcagtggagacactatatcaaataaatctacgactagtgggccagcggagtcgatccaataatagtttctccgcttctattcttgcttgtgggtatacactagttgtatagaaatgattagtatcgttatacaatgcttgaccatttcgagatcgacttaccaggtcgcgttcattataggtattggtgtcatgttctgcagcatgacgcagttggtagttcgttcttctggtacaattatcaacattggaaactccagcgctctgttttagacgtaacatacctttacccaagacaatatagttaccgggattcattggcattagttgctgtgtcggcatcgaggcacttgaagatttccctccttgaaatgaaaaagaagaatatgaacgagtagtagcaatacagcatctcggcagatatatatcgagcctactatagaccaaacctggaagcatcactatgtggaggaagtggtaaaagtatgcgagacccttgcaggctgggaaagacctatgtttggtggtgtggacggaaaatacatgcctgaaaattatctcaccaacctctacaatcgggactttcgccctcaagaacttaccgaaaattgtcaaatgctgggtatggattgctcgacattcgtcttctaccatgccgatctcggtccagtaaacatcattgtggaagatataccgaaagctggtactattgggatcattgattgggagattgctggttatgtcccaaaaggatggatacgaaccaagttccggttgtctagtggactggatcttcccgacgcgagccccggcgaggagtcatattggtggaggtcggaggttcagaaattactagaaaaacgtggattcgtggaccatgcgaaagaatggacggcatggcgtcgaaataaacctatttcgcagacgaattagtggcgtggaaagtctgtagtggcggtatgatacgatgctcaatgtatgtgaggcgccaggtcgatctgaagaatagaaagagtgcattcaactaattaactgagatgaagaaagaaaaaagaagcaggttgcaaggtggaagcagcctgttgatatagctgaccctttgcaaacgttgcaaacctcgaaccttcttgcttagcgatctagcaaacaatctatctagcaaacaatgcaaacagcagatagtcgccaatccgtagagtcatagaacgggcagtcatgcagatggtaacagaataggactagattccacatctccatgcggggtccccgcagattatgtgcccgcttacaatatttcgggcctcggtaacctgggaagagcataaaactagttgattgatgaaattctacatccttcactcgcataacacctccaattcttcaagatgacatcccttccacgtaaactatggcagcacccagccccagagtcgacccaaatgggccacttccagcgcgacctagagcaatccaccggacgcaagttcgacgtgagtgaatttcgcctgtctaacgataatatccacctaacatctcccagtctttccatgatatgtacctgtattcaatcaagaaccgctcggcattctgggaattctgctggaaatacttccaactgattcacgagggctcctacacaacggtagtcgatgagtccgtgcgaatggacagcgtacctgaatggttcgccggtgtgcgtctgaacttcgctgagaacctgcttttctcgcgcgttgctggcggcaagacagataaggaggacgacaagatcgccgttagtgaagtccgcgaaggcgctgcccatgaggttgtccacctcacctggggtgagctccgacgacggactggagcgctggttcaggctatgaaagctcatggggtcattcggggtgatcgcattgctctctgcgcggcgaatagtattgatacactgcttgtacttctggcatcgacggctctgggagctatcttctcgtccagttccacggatatgggtactaagggtgtcttggatagactgcagcagataaagccgcgctggctgtttatggacgacatggcggtttataatggcaagaccattgacctgcgatcgaagatcggggaaattgttcaaggcatggcatctgatcctggattcgagggagtcgtctcaatacctcggttctcttcgcagccggccgatatcagttccatccctaagaccaagcctctggcggagtttcttgcaaaggcaggcggcaacgagagacttgaatttgaaagagttggattccgtgatcctttcttggtggtttactcgtctggcacgacaggacagccgaagtgtattgtccattccgtgggcggcgtgctgctaaactcgaccaaggagggcagattgcataacgatctcgggcctgattgtgtcggcttgcaatacacgaccactggatggattatgtatgtgggttccgtgaagacgttgctctttggggctcgggtggtgctgtatgatggaagtccatttattccaagtatcactgcgttggtcgatcttgcagcgcaggaaaagtaagttgttgacatccacagatgtacatttacagttatcggctaatcaattgcagggtgacccaccttggaatctcaccccgatggctgcatgagttacaacaggctaagatcaaaccccgcgagaacgtcgatctcagctctttacgggttgtcacaagcactggaatggtcctgcgagatggattgtttgagtggttctacgacgaagggttcccatcccatgctcgcctgaataatatttctggcggcactgatatcgcaggatgcttcggaaccggcaaccctcttgtccccttgtatgttggcgggtgcgccggatgtagcctgggcattcccgtggaagtctacgactctacgattgacggcggcgacggaatcaaaggtgtacccgttgaggagggtgttccgggcgaattggtcgccacctctgcttttcccaacatgcccacactgttgtggggtgacgatagcggtgagaagtaccacgatgcgtatttcgggcgattcgatagtgagcgccattcacccctccatgtgcgtaggactacagtcactaaatctgtacagatgtgtggacccacggcgatttcgtctccatccatccaatcacaaaacaaatcgtgtttcacggacgcgcggatggagtgctcaacccctcgggagtgcggtttggatcggccgagatctaccgggtgctcgagggtcaattttcgaaagagatagcggactccatctgcgtagggcagcgacgaccaacggatacggacgagcgagtgatgctctttttgctcatgagatcaggggtagcattcacatcggatctggttgcacgagtcaagaacgcgattcggacagagctcagcccccgccatgtgccgatgttcacctttgagacacctgagattccggtacgtactttcatagggaagaaaagatctacaaaagcgggactgacccagaacatcgtcacagaccacggtcaatctaaaaaaggtggagctccctgtgaagcagatagtctcgggaaaaatcattcagccctcgggtacactgctgaatccgaagagcttggacttttactatcaattcgccaaggtggaaactctgcgccagagtaagctctgactggacccttggcctgaggtctccataataagaggggcagaccggcttcatcgggatcgtcacttctgccaagcttttatcaagctttccagggttagcaacgggatcgcttggaagttgtgtatatgaacacgtagtcgagagaaagtaggttggaatacgtagattgaattagactggattaggtagaaatactgaagatcataagtctaaggaagaataaagtcgaagaaggacaagtagagggaagagctgagggctgatggagtgggcatccactgcgtcatcgaagcttttcgatttaccgccgacgttttgccagcgacacggagcacggagggtatttatacaattcgatacgattaattacgctcgatcgtattttactccaccgatctgccgccaaatctcttcctcacctggtaacatcgtaacctataaaagtactcccctccccgcacgtctatttaccgttctcattacttcttcaaccctctccttctcctcaatctctgctttttcttcagttctttttgacctggtctctttctctcttgttttttaccttttacctatcatcttttattcgcaattatggttcatctcgccaaagtcaagaaggacagtgagctcccctcggctcgtcaatttgactccattccccccatcgagacaaatgacgccgacaccaatgtctacggcactcactttgccgtggaccacatgccccagcatgaaatgccagagcgggagatgccccgccagatcgccgctcggatgatcaaggatgagctgagtctggacggtaaccctaagctcaacctcgccagtttcgtcaccacgtacatggaagaggagatcgaggagatcatgaccgactccttcagcaaaaacttcattgattacgaggagtaccctcactccgccgagatccaaaaccgatgtgtcaatatgattgctagacttttcaacattcccaccgatgccgccagtgagaacgccatgggtacttcaaccattggatcttccgaggctatcatgctgggcacactggctatgaagaagcgctggcagaacaagcgcaaggccgagggcaaggacttctcgcgccccaacattattatgaacagtgctgtccaggtctgctgggagaaggctgctcgttactttgatatcgaggagaagtacgtcttctgtaccgacacccgcttcgtcatcgatccccagcaggctgtggatctggtggatgagaacacaatcggtatctgcgccatcctgggtaccacctacaccggcgaatacgaggatgtcaaggccatcaacgatctgctggtggagcgtaacattgactgcccgatccacgtcgacgcagctagtggtggcttcgtcgctccattcaccgaccctaacctcgtctgggatttccgcctggaaaaggtggtttccatcaacgtctccggtcacaagtatggtctagtctaccccggtgtcggatgggttatctggcgcgcggtggagtatctgccccaagaattggtgttcaacatcaactacctcggagccgaccaggccagctttaccctgaacttctccaagggtgcttcccatgtcattggacaatactaccagtttatccgcctgggtaagcacggttaccgtgccatcatgaccaacctgactcgcatcagtgacttcatggcgtcagagtttgagaagttgggcatggtcatcctgagccagacgcagggcaggggcctgcccctggtggcctggcgccttcccacagaccccaatcgggtctacgatgaattcgctctggctcaccagctccgcgagcgcggctgggttgttcctgcgtacactatggcgccccacagcgagaaaatgaagatgatgcgcattgtcatccgcgaagacttcagcatgaaccgatgcgacagtttgatccaggacttcaaacttgccattgatactttggatgcaatggacaagaatatgatggccaagtacagagtgtgagtttattctgtcctaatgtttcgattttcatactaacagctccacaggcacatgaagaaccaccgcaaccaacctcgccaccagtcgcttattcaccgtcactacctggaagagaagcactcgctccagggcaaggatggcaagacacatggcgtgtgttaattccgttgtgtaactgcctactggcggtttttgaatatacgtgcaaaaggattgaattagatgggatgttgaaggtggatatgtcagtcctacacgcagagtatcttgtgtcctcactacaggatccaactcattgggttgatctcttgctgtagtatatacaccacgatattgaaatgaacaaatcgatgaacatgaggttgagactggccatggcaagttagcgcgttacaagaaacgatatagtagaccacagtcctattcgggaaatagctgtcagttacatctatcgcttgtgatgtcatgcatacgtagatttatataccaaagccctctcgtgctgcaacggatgcttgcatttcctgccattatcccctcactactcatataccatgaagcgtatctcaatcgacccgaaggatgatcccccaacccgagacctcccactggcgacttccaccccggcgcaacttcccccagccaaggcgacaaagcttcatccatccaaatcaggcgaagagaacgcaaccctgttcttcgtgggaacggccacaacgattatgtcagttcacatctagaactgtatcagtgtgtacgtgtactaaaacaaagcagagaatgggcgggaatacggattatgactgatgtcagctcttgatgggaagtcgaatgctcacagactaactgtcttagcccaacttcctccacgcaggcgaacatgtccacctcggtccaggcgtgtcaagcgagcgcctcaccaacccggccgtcgacctgcacgacctccctcggattgatcttgtccttctttcgcactatcacgagtatgtctccgagcatagaggtattgagcgatcactgataatgtcagggaccattttgataaaatggtcgaggcttcattgaggcgtgatctacccattatcacgacaacacatgggcaggagcgtctcgcttttaagaaacaggacccatttacgtctgtatgcgcgcttaaaccttttgagcagattgaggtcaatattgaaggcaccgaaggccccagacagccccgcctgcgtgtgacgggtatgccggggaagcatgtgcctcctaagcgagtggtagagaagctcaacgcgctagctaaggcggtgggtggcattttcttttctagatattcctactagatggcaatcaacctaacacagcaatagttcccaccaacgaacggctggatgctcgagctcggccacggcagctccaatgctgcagacttctcctgcggttatcgcatctacatctcgggagacactctgatggtagacgagctgcgcgaaatctccaagcgatacgcggaccaacgaatcgacctaatgctcgtccacctcggcggtacaaccattccttctcccttagtaggaagactaatggaaccgctagcgttgacagttacgatggatgcggggcagggtctgcaattgatccagctaatccaaccagacgttacgatcccgatccactatgatgattacgacgtatttgcgagtccgctagaagattttcggcgcaatgtggaggcggcggggttattgaacaaggttgtgtttttggatcgtaaggatcagtattgctttcgagttatgggatagaagtgcctaatagtaagacattgggtttttgtctgttcagctcagccctggacgcgttggtctggggctgagaagggctccatcacatatttcgactccaccattcttggcatggggaatgggacttcatacgagaattatgatttacttcgccttgagcggatcttttggggaatttgggggcagtttgtaaccgaagtatggtatgtacataataggtgacgaggctctacacatggctcgtatagtgtgtttctctatgttgtatatcgaaagtattgggtcaaaggctttctttcgaatcttcttctttgagtgttcatatattctatattgtagttagggcggatatactagagagatgatatctacacttcctaacagttaatcggcattatgtcttatatcagatactatgctattctctgtctcatatcactcatttcattcaattgctatatactctggcatcccaccaaggccatccattgtttaccctatatatagaacaacctctccaatcaccgcccgtcaacccgctagggtccaccaaatcagcctcttcccctctctccctctctcctttttctcaagatcaaaagcagtgatgcgcaacctctttaagagcaagtcgccttcgaatcggacaagtcaccattctatgcgcagcgccgaacagttggcccaccccgcgtttactccaccggaccccaacgcacccaacacggagtctgaccggcgcctttcacaattcgagtactctggttctgtacagaatcagcctcagggtttgaatcggtcgcaaagtcagcgtcaaaaacctttacgtgaccgaccgaccgtcaacgtcaccgtccccgacgactcgcgcaaaaagggccgtgtcgagcgcagcgtctctgtcaagggcaaaccaatctcacaacctacctcacctggaactttacatccagagaccttggacgagtccgacgaatttccgccacatctccggcattcctacacggagaatccctcacctgtggcgccgcaatctctcgcgtaccaaccgaaataccagggtcaacgagctccccgaccttcccatcctgctcacgtccaagacaaccccgagtggtcacagaaacctgtgcagcctgtgcaaccgctttataccaaactccagcgatccaacaccgactcaacccttgatcagtactcccgaccgtcgcccaccgatatccccgaatcaccacgatacacggaacatcttcatcggggacaggctttctctgcccaggatccggtattgaatactcggcccccatcccagcagactcacgagccgctttccccgttgcagtcccgttaccctgacgccatgcagtcttccgcgcaggcatcaaaccagggtttttatccgttggacagacaaaaatccgccggttctccgcagcagaaccggagtcggcaggggagtgtgtcaaacaacatgcctgatcccggacggagtacacccaccaaaacacaccgccgggaggagtccggggaagtggacgtgcgggcattgatccagaagcatgatgaactccgtaaggattatgattcggtcttggtttttgataaactaacaatgagcagaggccaagtattccaaggtgaaacgatactactttgagaaagatgcgcaggtgcagcatctccagaacacggtggcgcaccagcgaatggcggtgtcgcgtaccgtacttgacgataatgaatacaccagccgattccagcgcctggacggagcgattaaagacctggcattctccgtgcgcaaagattggcgcagtattccggcgtggctgaatggaatggtcactgacgatgctttgtcggtcggcacgaaagaaatgaccccggtcggacgggcagtaatcagccggtggctagtagaggaagtattccagcgatatttccatccgtgcttggatccgacatttagcgtgcagctgaagagtatcgaaatgaacctgcgacggcagcgaccgacatcggaagaagaccgcgagaatgcttccgcgagactctcctactggcgtcgcacgaccttcgacggactgggtgattccttagtcggacccgaggcccaagaacgtcgcgttgagctagtggagcatctaatcgtggagctcgctgccttcataggatcccaactgcacgaaatcgcgctgccagggctagaagcaagcgtgcgtatgattatcgagaactccgtcaacatcatcgagaaaatcccgctcgaagctcgcgatgtctgcgtcgattacttcccaccgggcatctccctcgctgagcaatacatgaaggtcgaaggccaactacccgcactgagccacccgcccccgccaccctcggacccagagcagctcgaggagcctgtcgcggcagagggagatacctcatccggctcaaccggagcggtagagagtacttcatcggcacagaaaaagtcgacgaaaaagtccatatttggcgcgttgataagccgcaagcatggcggcgagaacagtcgttcgacgccgccgcctgggccagccgaggacaagagcgagcctgcagaggtagcgccgagcgccccgcgcattcggtttgcagcgttcctggctgttgaagtgcgcggcaaggggcctgcaacggtgctgatcaagtcgcccgtgtggctggtggaataaacgtgatccatcagtgcggccggttagattggcaccattagcagtggttctcgatttaaatggtggagggtgtatatagagaccggtcggagctgtcgcatggtgacgaagcttatgacttgttatgtcctttgatatcccaaggcgtttcagttgtccagcggcggtttgcactttgcagtggtcgattttcttcttttcttttctttgcctgacgattgcctgacgactagaatccctgattctgctatgattgtgcttttgagtagaaagttttgcaattcgatgtttcttagcggcattcttcgtagctaaatattcattccattactttcagtccatatccgcatcaatactcaataccatataccttactcattaaatcatcctacaacggcggcggcgccagatccaacccctcaacctcgaatttaaacgcatcactccgtgaataactcccagcaacatcgagatcgagccgtccacgctcgcaatcatccaagtcaatgcatgcgatagctaaaccatcacccgccgccacagcaggactagactccgtagcggacgtgccaggcgcggaatccgtcaccgcagcatcgctactatccggcacgtcatccgtgcagacttcccacagcggaccggcaagaacgtctccaagcggcgaaacaatacaacttccaccccgacagacataatccaagaccgagtctgacggatccagggatgactgcttagtattcgtcgcgggaccctccgaccgactctgggcctgatcctgggcctcgccgtgagtctgcggccagacaatctcatgcggaccctcagcagcgacggacattttcatctctggatcgtgcgatttacccgaactagattctggaattccatcctggcttgcaccggtaatccactccggcagctcggagctacgcacgcactggttcgccgagagcacgaagcagcggccttctatgccgatggtgcgcatgagcgggagccaggtactgcgggcgtcggctgtgggagcgagatagatattcacgttctgggaatatagactctgacgcaggaggggcatgtagctctcccagcagattgcagaggctatggttagtgggataccgtttagggttgttgtgacagcgcggagagtcgagggcgagccctgagcccaaatcatgcgttcagcagccgtctaccaggtcagtatacataccgaatgatagcgccagagaagaagaaaaagaaagaaaagtccataccggcataaccttcctcctcttccccagaatacctctaacaggatcaacataaacaacagcacaatacaaactccctcccgctctctccaccaatccagtaacgacgaaaactcccgtctccctcgcaacacgctccagaaactccctcgtcccatccccgcggaacctcttaccctctgcaatctccagcctgcgagcaatccagtcagccccggccccagtcggtgtatcgcctagatcaacagcggccttgaaatacacgaggaattggtcccggccgcgcgggtgtcgacttcccaccgcagacccgaacgaacatgtccgcgggtatccgcctagataggcttcagggaagaggaggaggtggacgccgcggcgggcggcgagggtgcttgttcgctcgagggcgcgcagggtttcggatagggaggtttgggtgcaggattgggcgactgctactgtgagagagggcattttggattgatgttgggtttaggttactattggagaaaggagaaggggaaaaggggaattgagttgacaatgacggaatgggctcgaggaaaccttggatgcttgaagcttggctgggagtacccgtgtagtatatattgaggttgaatggggatatagagtgtgttatgtagactttgatatcagtaggtggacaggaagtccaaagaggcttcagactatcggatgaagtaactgtgaaatgtgattgtttgcttttaaaaagcctataaagtctgcactttcttcctcttcctctcttaatacttcctcattatactttcacctatacacttataccaacgagctttgaagaaatgtcgacctgccacataagaaagtgacggtggtttgatgaagcaatatccgagagagatattctttcatatatccaagtatctatgatatagcgaaaaagaagtaacgttacccccatctgacatttatcttctctactgacccaacttgattctccaaaggggtctatatggcgttgttccttggacgagctcggcaatgaggcacccgtctacctcttgtgaattctcccttcttcctacctatatacatgcctcgattctcagggatgaaccttatttacgggacgtgttacccacaagtcgttgaacgagtacaatcatgcaaaccgcgcgcatgcatgccacgaccaacgggcttcgatgaagaggaccaaggttattggaaagcccacagagctacgctactcccagcaccgaacaacgagcagctatttggttggggtttccatccataatcaacgagagaagtcgtttcgaacatgttgctccgaagctttctttctacagcaccttcaaaacctcgactgcgttgttctcagtcaaagccattttattctctcggtgctatttcggataacatcagtgtcaggatgtgctctggagtttggttttgtcagaatattgttcgcggcatgacatatctatccaaaggctgcgatggcaaatacgactgtaaccatagttggcttgtgggatggaagaattccttccgtcgtctataacattcagtttgatcttcctcaaggccctattgtggctcgacctctgaggcatgagatactatcgattgtaacggttttaattacaaatcaagacataagaaaaaaagttgtgtatgaacagtagggtataatcgaaacaaaaagaaagtagtcataaccgtatagaacgctgtacaaaaatagaacttttcttgttagccaccatgattaggggtattggtcggcgattaacaaatgaacctggacgaaaccatccacatctcgtattcctcagtggctggctcgcagcgtgctcagcctttccgagtactcaggaggggcaaggcccacgtcaaccacctcactgcgagtatggttggaaaaatcggtaggagaagtcacattgcgtgggtggaagaactcctctagttcttgctgtgtgacagtgacaccgagtgcagccttgatggattcagcgtgcttggcttggctcgtgaactgcaccgggaggcggagggagattgtcggtgtcatgaggttggctgcgggggtgtggtatgtcaaggagagctcgagggcgtagatgcgggacatcagacaggaatggaaagtcgggacaaaagcttttgactcgggcagggtgacagggaccacgactgatgcggtgtagtaagtgtccccggtgaatgctgaggacgggcccgttgatgaatcagatgacgatgagtcggtggagtcgcggcgcatcgagttggctgctgatgattgctttgtccactgggcggattcgacacacatggtcaacagaggcacgctttctgtgtagaggccgcatccgatatgggcgaagggcatgccggttgaggaagggaagtcatcccatggggccgcactgaagaatgtgctgacgcgaagtttgctggtcattgttccaagtgcgggaggcttctcgtccccgattggatcgaatcgcaggtttaccgtggccacagtgctcactgtatcacttggctcaccgtttggaggaagcaattgaacggctttgggctgggaggatgaagcaacgatgtgtcctaatttgcctcgcaatgttccgcgcttgacgctcttctctttgcgtgtgcagaaagatgggttcgccgaggtttcaactgggggttcttcttcgacaattggaatgatacggatcttcttggcaatggcggcgatagccacgaatccagggccggtgagttgtttctgaagaacagaggcccgaaccgtgtagccaatctgggacatgttgggtgccatatcatctagcagtgtcttgccattgctggcaaggatgggatcacccaatgttggcggcagcatagtgtgggatcgttgaatgtgagcattcttcttggtgtgggtgcagacctggggcaacaggtggtccgggacgacgaatgtgaaggggtattcatatgtccggccactctctagcactcgcggagtcggatattccatttcatcaataggctggcgcaacttaaggaacatctgttgtgaccccgtccggccggggcatgatgcccgttctaccgtagttcgagatacacctgttctcaaattaacattgctcacaggccgggcttcaataggacttaccttcaaacaggatctcaatctcatcaaatcgggtctcatgctcaacggtgacggttatggtgccatcaatactctctgcggtggtataagagttgacatgtcctggcttttgtcccgcaagatatatctcgattttaggctttgagcgtctagtccaggcatctaacctgtctgagccagagctgatgattgaagtggccgttgacattgttccacggaaaaagcaaagagaatatgaagcctcgtcccacggagaaatgcaggaacaatataaccgacacgtcaaagttaagacaagatggaatatcaaaaagaaaggaggtagaatagagatcagatcgaattgttcttaaggaaaaataaaggaaaaaattagtaaacggtggagccgttgacaaccgcaatggagtcagacaaaccaagtgtggaggagccgtgacaagcaatgtgagcaaggtttcagattgcctcatcgcatatccctcaaggttcttataaatcaggttggggtgtgactcacgagtcatctatagggcgcagctaccatgatatcaaatcacgaccataacctacttggaacgcccccaaatccaaaaaacgagcgatcgtatacacttcagtataaggaaggccgagccatggagtgatcggaggggagagagtgattggtcggatgcgaggatccgttctcgcccatgcacgcccttgggttgacattccgcttggccaaggagcatagaacaacgagaggtcaattcaaggtcgcacatgatattcaggtggatttccaactctaaagaccctatctctagaaaaacgcccttcttcttttcccgatcgttcagatccgatcttccaacctaaaacagccagtcaacgtccaagtacatcagaagtacggagtaacagagtacaaactcaagggggagaagtggagtgcgccttactaacgacatgcacgccctttgactccacccacattctcgaagggcgcccgagctcctctgctgtgctcgtgaaatggccaatcattgtgtgtcgtggaactctgtttatcagaatgccgatttccaagcaatatcccgtggattcgcatttgtaacactctccagtcatatgtgaggaccttcaggttttctagacatgaggtctagtataaactcttcccgcggaaaagagaatatggaacctgggcctagctccggccccagagatttccggccatagccgagcttttttgcgcgccgagcttgttttttcttgttctcacggagtgtcggagtgtcggagtaaacaaaaagatggagtctcggatggtgcaatgcgatctttcggtgtgcaaagtcatggggaggccgatgatcaggtgattcctatgcacgtgtttatatgggaaagtcgtgcttttcgagttctacagctttgcaaatatttcaagagctcaagataatcggagtattaagctacgtatatacaccaaaactggaataaaaaagatttagaataaattgtttcattcagtcactaggataagatgacatttacaagcatgtcccaactgataaattacgacgcagacccgtggtgcatttcggatcaaatcgtactcaaaaatcgtcgacgcgctttcacgcttcttctcgtctcgtacaagctagcacaaaaaagtgaccagctgcatccagctcaagattaaccgacgggaaacggcagaccgagcgaggcaagagacatcataaaagtctacatggctaaagatagccaggggaaaggaaggggaaaggaggtctatgtagtgcaacgtcgaaacaatcagtttcacttgaaaattagtcgtggttcaaatctgcataatcatcatgcattaagaaagaggtaggtatctgaagcccgtagataggacagcaaggaacgccagcagacgccgcaaccaacccgaaatcaatacgccacccgtgttcgcatatcctgggaggtgttagtaaaacgccaaatacacactggggaacttctgcaacttaccgaaatcttgcgctcaatctcccgaacagatcgatcaagctcacccgcaatcatcaacttggtatcattaggcagcagaagatacatttcgcaaagatctccgtcaataacgcccttcacaggggcatagtagctgcggtacatcaaatggtctcgtccagccagagggggttgctgggaagccagctgggtctccagaagctggaaaaagtcgacatcctcacggctgacaaaaggaacaaacattccaattgtgccttggagaccagtccagacaataatgtcacgacctccagcgactaactgagtcttgtggatactagtgggaatatcctgggcatagaagtggatcatcaactcgagacggtggggggttccatggagataacccttttcgtggatgaggtgcgccccagatccatcttcgtcagactcttcggaggccttgctagggcaacggaccagccacaggtttccgaacttgtcaccaccagcagtcgtctcgtaatccaccatggttgtactcgaggtccagcgtgcgatggaatcgtccgcgaaggggatcaagacattgtcctggtacttgtagacaacgtaggtgacactctcacggacgtcgctgacaatgattcggctgccttgtgtctgcagacccacaatggtcttgggtaccacgggtgcttgacatttccgtaggagttgcttcatgccaaggtcgtacacacgaagaatggggccgacgcctgccagaagacgcccttggaagccgagaagagcaagaggaggctcatcaacttgagtcttgtgaatgaactccaattcccgaccatcctcctggaatcgatagatatgaatgaaaccacaagaggacgagggagggctgactatcatatccttggcagttcccacaaccaagaaagtttcatcgtcttgactagagaaggatacagcggcaagactgactgctgcctcgttgtcctcaaggtcaagagtgaagatcacagatttggtggtaaccgggtccacaatttggatgcatgaagcccagtggccagtggctcggggatatccgaagtcaactggaggaaggtccgcaacctcgccattctgagcttgggaatcatcaatcagtctctgacgggtagcaggagagaggacattgttgtcggcttcaatgacgtagaagaggggttggtcggggtgcttcacaaagcgtcggggagtgtaagagagagggatggagtcttggagcatattgttgtccaatttctccacagtgaagatcctattttcggttagtaccagtccagaagaatctgcagtctcaacatggtataagagaaggttgatctcagaaggaacaattggaatttttcttttaaagtttcatccacatagaagttcggattgattttctcatcatagaatcaaggggatgggggaattggggggattttggatgaacataccgtagactgcggccctgaattccgatcatgccctccacacactgctcactggagaaattccatccccactctagcccaacatagtccaagggtgtgagcataaaactcttggtttggacatcggagtatcccagccagggacgggtgctgagcgccagcacagctgtttggcccttgaccgatacctgggatagtttcacaggtttggcaccgatgaagcgagttctggtatccgagagctcaccggttacctcgtccaaaacagtacgaaggtagacacctgagtaaagaccaatgtggagataaagagtcgtgcctcccgagctcgaatcagccatggccataatttgcaaggcagatggtgcagatgtcaaagcttgaactgatttgctctcgagtgttgagtctggatcgaggctgagaatgcggacggtggagtcatcacatccaacggccaggaaggagctgcgcatgcgaccctctggtacctctcccatactcagggaggtcacggtaccagacatctgtcgtcgctcatcatactctgccaatgtcccgtccgcgtccatctcaaagtagacaatttcacctgagctgagtgccactgcaacttgacgttcattggttgctgctgcaacgatggaccgatgctgcggaacgggccattcattgactcgctgatctgcgaggatgtgacgaatgcctcgagggtgaacttggactaaagaatcctcgccgatttgttgcactgccagagtaggggccgaagaaaggaatccagtgtctgaaacttcttcgacaatttcgccgatgctcaggacgagggtgccgttggcaaaagaaagaatgatgtatgtgtgaaactcatcggctcgggttaacttggttgtccatacagccgaaggaacttgctgaaggtccgactccacgatctcagaaaccttaagtgcgtgcttcaaggtccggaatgtgctgcgggccccagagccacagattgtgtagatttgaggggcatcatcctcactcaaattgaggattttactgtcaatcagagggctcaacgagttcatgctttccatgaggttgacattttcagcgcctcggggacggaagtagattggcgcggaagacacagagtgatcagccgagaatgagtcgctggaaaagactgcctcgttgggatcatcaccaagcttctcgaattggtagaaattgtgatttccagattcactggcggcatagaggaaaccgcttttcagaatcagcagattggttgatacaggaatcgtatcaaagtatttgatcgtcagtctcttcacttctccagtaggtttgccctgcttgtcttcgaccatttccaggttcaacttgaacagatcaccatcctcggtttggagaaggaagaagaaagcacctctcatcttgtgcatgactccagagacaatcgagcgcttgcgctcggggttttcggtgggtccacgacgtcgagggatagggacgcggaacgcaccctgattggagtggcggtaggtaatgttatcctccgcgcacaccaagacaccgcttgggccatcatcgcctccaggtacctggaacagcatggatgctgtgcgatcaacagggtcagaccacttgcgaacaacgtgattcagaccgaggtcaagttcgtagtacaccaaaaccttctcgagttcttcgtacgcttcaccagtaggatcctggtcagattccgagtagtccacctcaagagcagcgaaaacggggttgtcataaccgacgtccaagcagatcatggcaaaaaccaaggtctggggcttgttggcttcgagcggtgaggagatggtaagctctgcctgcgagtttcggttgagaacatagaccagcttattcttttccacggaagcaatcaggcacgcacgtccctttggatccaccgcgaggtattggcccggcacgacgcgacgaaccccggattttccgaaggtctccatatgaatgcgattgaagcggttctgggagggaacatattcaatgattgtgatgcgacccgagtccgagccgacgatgatgtaatctatgagaatcagcaaagtccgttgataactaatcgttacgagtatcaacgtcgctgtccagggcaggtctcaaccctctttcaaggggagacttcgtaggagtaccgtgctgcccaggaagcttggagaatcactaagttgtactcgtagaggggcagatgaggagcttaaaaagtaaagcgacatacctttgttgcttccggctacgcggaaagctgcgagggagcgaatgatgccaaaaacatcttgagagaaaagaggcgtgatcttgccctgtgccgggtcaggccggtggatggttaatttcgagcctgacgaggtgacgatctgctggtccctagtgcctgcgaattgacctaagatggcctgtgtgatggcagttgggggctggatcgtcagggagtacataaacatgtgcgatgtggtagccatggtgcgcgcgttgaacggtttccccgtaccacacaaaagacgtgaaagctttgtacatgcaattgcaagtcagggggtatgaatattacatcagtcccatccctgctgggtggagataagaaaaagaaacacctcaagatcacttggcacggatagagagaggtgtagccgtgtgatcagactcgaagaggtgaggaagagaaaatattcctggccctgtgggagcttcgactagcgcgatttgcacgtgatccatgtttcgaccgccttccacgctgcgccgattgatgcaaggcagatcgcctccgcataacgggctcactgactcccctctttcttgtttcatctcactttcactgttctcatccatatcaccacagttcatctaatcgggcgtttgatcagcccggcaatagtcttggtgatatacccctcatcattgatctagcttctaataatcacccacttgctctacaatcatcatacatccttcagccatggccgacgagacagctaccacagagcagccccccatcaccttcactgtcaagtcatccaccgatgccaaatacactctcaccctcccgctcactactctggtgtcagatctcaagcagaagctctcaaccccagaaaatgccgatacccccgcagaacgccagcgattgatctactcgggtagggttttgaaggacactgagacactggagacctacaagatcaaggatggccatactattcacctcgtaaagagtgctgcgagcaaccagcagcgccaaaacacagctgctcagcccaactcagcttctgcggccggtggagcaactccagcgatagctggtgtcccaaccaatctagccgctggtactggtaacaacccacttgctggattgactggtgcgagatatgctggattcgcacaacttcccggcgcgggccttttcggccctgatggcggggtaagtgagctattatggcggatggaagctattcagcaatgcctccaacagatagctaacattctttggctacttagatgggtcctcccccagatactgagtcgatgctcaacatgctcgagaatcctcaattccaatcgaccatcaacgaagctctgcaaaaccccgctatgatcgacatgatgatccagcagaatcccatgcttcgcgacatgggacccggagtccggcagatgatggaaagcccagagttccgccgcatgttgaccgatccgagctcgattcgacagatgatgcaaatgcaacgagctatgggaatgggtggcggtggacttggtggcggtgataatgcattccctgccccgggggtaacaaacacgaccgctgagggagccccaggttcagagcaacagaacgcgcaaataaatccatttgggcaggcggctcagaatcctcttggaaacgccaaccctttcggtgccctctttggagctaatccgttcgcaaccccagcccagccttctgccaccccaggcaccacttcacccggcggtgcacaaggtgccgattctacggaccgatcaacatctgctgaggggcagactcctcaggctgctccgaaccccttcgcagctcttctgaacccggctatgttcgccaacgctggacaagctggccagggcggcgcgaacccgttcaatcctcagcaaaatccgttcctacgtgacccggcgctacttgcccaaatgatgcagggaatgggtggacaggacgcacaaggtggggctgccggtgcaaaccctctggctgctctacttggcagtggtggtttcggaggtggtctcggagcaccacagccgcctgcagacacccgcgccccggaggatagatatgccgatcagttgcggcagttgaatgatatgggattctttgagttcgagcggaacattgaagccctgcgtcgcacaggtggcagcgttcagggagcggtggagtacctcctcagccacccatgaatcatgatactttctgggctgctttcttttctttctagcacagccttgcggttacttttttgatgtattcaacttctattgattttgcgaggtgatgaaatgctccctcggtacctatgactttctcattccccttttagcatgcttatcttgtgtgagatccttagctagttttctggatatcacattgttccagggctcagaatagcatgggatcattttctaattgaggtttctgtgatactcccaatttcgtacaagtcttagtctacaaaccttgaatccaaccttggcctatcccagagttagtgtggatgcaggaattatatgaagcggttccggaaagggccctaatgtttccccctgaagaaagggctcgaaatgtctgtgtcctagattgtattatagttcgcatgctcttggtgcctgctagttgagtttccgggcttggtattagggtatgatatatatcagtcagatctagaatgattccaatttttgcaaccgtcccttggcgagctgggatagacgtatcttacaagtcttacaagtgtatattcggatacatgtgaatttgaccatccttttagtgccttcatccatatatgcacccccttcgcccctgggtctgcggtatgttgattaggtaacccggggacacgctggagtaggccagggaagcacgaagctccctattaagcccccacagttgctcgaactcctttctcgacgaacttatatcactcctgtggcactgagtgccgatttcagtcgttacttagctgttcctcggcagattgcgggcgagctgaagcaatccgatggtccttgacaatctactattcaacacccgcttcctacataaagtccaccgtcgaactgtccatcggccatctcgacaaagcatcccttgaacgagatattgcctacaccatagtcatccctgactcacgcgcttcgatctaacctttgcgggtcgacacgccgttacccaccgacgtacaaccctctccatactttgtgtacatgctgggtcgataactacccgttcactccgggtcgaggacaaaacatatctctttgcattattgaatatggcctttggtcaattctgttcccgtcagtgggcactgtgggtgctgctgcttgtgtcctgtaccggcgcattctacatccctggtaagcaccgtggcgcatattggttggactaagcatatgatactcatacttttcctcccaccaggatactcaattacccggtataatgatggcgatccgattcctcttctggtgaacaagattttctccgatcacacccagctgcagtatgcgtatttcgacctgcctttcgtctgtccgccgagcggcaaaacacatggcggctcgccgtttggatccggccaaagcatctcgctcaatattggggaggtactgcgtggcgatcgaatcatgacctccgacttcgaagttgcgatgggaaaggatgttgagtgccggtcgctctgcacccgtgatgttagtcggtcaaatgtgaaatgggcccgtcaactcatcaaggagggatatgtgatcgaatggattgccgataatcttccaggagccacgagctttgtgactgtggatcgaagccgcaagtattacgcttccggattcaagcttggctatcgagatatctctccagtcaccggacagcatcggtactttatcaacaaccacttcacgatcgtcatccgctggcggagcgcaccggaaggagggaaggtgatcgtaggctttgaggtgtacccgaagagtattactgccgaggaccgcctggaaaatggatgccccaaagctgtccacaatagcaacgaaggactggggctgtatatcgcgccgaatctttcgcgaatggaagagaaatattccggactgtcatatatcccagatgatgatgacgaagatgatgacggagccacactgaaggttccctacacctactctgtctacttccgagaggacaccaacgtcgagtgggccaaccgctgggatttatactttaccaatcaggttgaaagttcgataacccattggctggcgatcatcaactcattgacaatttgcaccgtactgggagtgaccgtgttcgtcatctggagccgtacagtgcaaggcgatctcaagggtcgcggcgatggtgcgatggacgatcggaagatgaagggccaatctcgacgccggagtggcaagtctgagaagaaaggcgaggggcttctggatgatagcgcagatgtcgagcgcgatgcagactactcctcagacgatgaggctgtcgaagatacaagtggttggaagcttcttcatggggatgtgttccgtatccccgcctatagtggtcttcttgctcccttggttggatcaggaatgcagttgttattcatggcttcaggcttgctcctgcttagctgcctcggaatcttgaacccaagcttccgtggtggcttcgtcagcgttggcatgggtctgttcgtctttgcgggccttttctcaggttacttctctggaagactttacaagacctttggcggaaccgcttggcgcaagaacacgctcatcgtgcgtatcctactccaattattcatgtgctatgctaatctatagttctagaccgctttgcttttccctggtctggcattctgcctcgtgttgattctgaacttgtttgtctgggcgcaagcatctagtacggcaattcctttcggcactcttattggtctccttgcactttggctgctcatccaagttccgctggtatacatcggcagctgggtcggctatgtgcgtgcgatgccatgggagcaccctctgaagactaatgcgattgcccgccaagtcccaccccagccctggtatctccgcacccctctcgggcctgtggtaactggcgtcgttccatttgcagttctttttattgagctgctattccttttcaagaacctatggcaggacaagtctggttattactatgtcttcggcttcctgagtgctgtctcaaccgtgctgattgtcacggtcgttgaggtgaccgtaatcgcaacatacagccagctttgctccgaggtaagactgttcttggcttggtttctggatcatactgactcccttagaattatcattggtggtggcagagtttcctcaccggcggaagcagcgctttttggatttttgcctactgcatctggtattacatgttcaagctccacatcaccgggttcgtgtcaagcttgctgttcttcagctacagcttcctcgcttgtgctgtgtatggcctgttaactggaaccgttggtttcttggccgcttatgcgttcgtccggcgtgtttataggtaaggtcattccattgaatctgctaggcaagaggctaatcgtgagaattgcagtgctatcaaggtcgactaaaagttgacacagctaccatcctcttcttgaacttcttcaacccagagacttgtctctttaacatctacctctttacgatctgtccgataagcataggtgaagtcatctaccaccatggcgtctagtattctattttctgcattttctggctccgaacttttgagcctttagttcccccgttgttgaacacacaaggcacttctctttccttattttgtgtccgtgccaaagtatacatcagttataatgtattgatatgtcgctcaaatccgaggacaacgttacctagtatgtcgacatccactgtaaatcgaatactgttttgggaagtacgatgccaagcccctaggaaaccaagcgttgctctttcccggaaacccctgactacgatccttcccggatttagctcaaactgtactggcatatgggatcgagctcgtggctataaaacagaacaggtatcccctcacaaggaacgttggaagcaatgtagaagtatggctttcgtctcgggtttcttttcgcctttctccctcaaacacaaattgaacctgatgttgtatttttagttgcaatatggggcagggaacaaacgcaaagccacgggaaggtgggtgccgcggccatccgggtaagccggttggcaaggggtccttgcctttctctttgatagtgtttatcagatgtgatcaaggcatacacaccgcattacactacctgaaatagtatgcacatcataagtctatatcgggtcaaagcatccgtgactccgtgacttgcaaatttgtactccgtacatcaatgtagacgtggccatgtggagcaaatcggacatatagcaagaatcgtgcatataacagctgctaagaaatagcggtgactatgcttcgcctccaaggtacggagtacatatgtacataaatccggggcgatcttagaccactcgccatggcgtgctcggaaagggggattgctcattgtggagctgtgatgtacattgcgttgctctccttttctttccttttgcttcagcaaagtttgaagagatgatagaagaaaaagagaagaacgagaaaaggagtcccgtcggcggtctattccgtcgatatctcgcaccctcaccgcgctcttcttcaatagtgtcaaatcaggcggtttgattgggcgtcaagataagcaagtggatactgaactctaagctcccactctaaccatgttgggatatcctaagagaataaaagactgcaaccattggctgagaagggaatgacacgatcttatggatcccaaggtttgcctagggtcggcttcgggattcactaggctgaaaacagttagcctttacaagatcctgtcacgctggaaacgctgccatggacgtgggctgcccatgccgttatccactccggggtcgagtgcgcgtgggaactgcactgaagctagactgcgtactaaaacgccggcctttgacttgatatgctttgatcggcattattggtttggaggggatgagatcggtggtggttttacatgctcggttggtattgtggtggtattgtgactttccaatgtgaccgacaccaacgcggcccccatagttgtaaagtggcaactcactcggcacttggcccgatgggatttgattacctacaattgataaaaagcactggtcgtgtgactgagattgttagtttgatctgtttattaaaagataacgagaatatccacttgggagagaaagtatgtggtttatatgtcctccgtaggtaaaggtagattatctacttcggtattacgttaccatacaggctcttccgaaatcacaccatcggtgcctcaaatgatcccatcgtccttgcgggggagtacgtcagtaccggatcacatcccctgatctccgttgcaggcgggaactactttgaactaatcgatttgggatgcaattgcaatgtccaggccttttatggagtacaggatggtcgaatctaaagagaatatgatcttcattgggtatcgcaatacattacatgaaaatacatacccttttccgtcttggcctgcatctgtttgctgttttggtccgtcgctctcgaattatctcgtttttgcctctttgggtcttttcttttaaaaatcttttttttcctttgttccccacattctccctcgacttcatatatcactcgctctcccacactttcttccttcttcattcctttctccctcaaattaattccacctcccgccttccgttggccgtctattgaactggatattcaccatggcgaccaagaagcccaacatcctctacatcatggccgaccagatggccgcgcccttgttgtccctgcatgacaagaactcgcccattaagactcctaatctagatcgcctcgccgagggcggtgtagtcttcaactccgcatactgtaactcaccactgtgtgcgccttcgcgatttgtcatggtcagcggccagctgccctccaacattggcgcctacgataatgcggccgaactgcctgcggacaccccgacatatgcgcactatctgcgacgagagggataccacacagccttggccggaaagatgcacttctgtggcccggaccagctccacggatatgaacagcgtttgaccagtgatatttaccctggtgattacggctggtccgtcaattgggatgagcctgtaggtcaacttgcgaacacccggctgtggcaccactgattggaatttaggacatccgtgccgactggtaccacaacatgtcctccgtgatggaggcaggtcccgttgtacgcaccaatcaattggattttgacgaggaagtgatttacaagtcgacccaatacctatacgaccatgttcggcagcgcaccgagcagcctttctgcttgacagtctccatgacccacccgcacgacccgtacgccatgactaaggagttctgggacctgtacaatgatgtggagatcccattgccgaagaatggagctattccccacgaccagcaggatgcgcactcgcagcgcgtgctcaagtgcatcgacttgttcaacaaggagatgcccgacgagcgcatccgtgccgcccgccgcgcctactatgccgcctgcacatacgttgataccaacatcggcaagctgctgcgtgttctcgaaagcaccggtctggacgacgacaccatcattgtcttcactggcgatcacggtgacatgctcggcgagcgcggtctgtggtacaagatgacctggttcgagaattcggcccgcgttcctttcctcgtccactcgcccaagcggttcactccgaagcgcgtgtcggagaacgtttccaccatggatatcctccctacattcgtcgaattagcaggttgcaaactcgtctccgaacttcctctcgacggtgtgtccctcgtgccgtatttgaccggcggcgagggtctccgcactgatactgtctacggcgagtacatgggcgagggcacccaggctcccctcatgatgatccgtcgcggccgctggaagttcatctactcgaccatcgacccacctatgctctacgatctcgtcaacgacccagaggagaggaccaacctcgcagctggcctccccatcccatccagctccacccgcgcagccataatagccaaccagaccaacttatcatctatcaacttaccaacccctgacgacaccccgcacgcatcgccagttcctcagcgtgtcaactcggcagactaccccttcccctcgaacaccccccctcgcactccaagccccgccaagctcccgcctgcagtgcctaaaaccaccgacccgattaaaatcctggcgttcttcctcgaggaaacccacacccgctgggatttggagaagatccatcaggatgtactgcgctcccagcgccgtcgccgtctggtctactccgctctgatccagggtacccagaacgtctgggactacgagccacgcgtcgacccaagtactcagtacgtgcgcaaccagggcaagggtgccctcgacgatgtcgagctcatctcacgctggccccgtattctccagcaagccgctactgccaatgggatgtctgcataatcaccccgatcaggttttctgaatatacccattgactcgacattgaaaatattccattcttgcattctttatctttattcatttctcttgcatttcagcaccatttctattacctttttgcggcattcccggcattctttcatatcgggatccaattcttcttttttcagtgttgatatttctggattctttacatctctcattctcatagtaaggcgcgcgctatacccgggacttattccccaatctgcatcttttcatgtcggttgtggctacgtggattattttgtacatagttgtgctcatggttccccgggttgggtgtcttaccctgtatattgcggctggtttggggtattacatagacaaaatgcaatcagactgtcatttgggcttctgtactggtggtccacgttcttaagccacaatcaccatatatgtaaattgtattccacccagacgtcctctggtaacatcagctgaacgccgatcgctagatctagataccaggagatggccaacatggaggatcaagcggctcggcgcgttgagatattcttttcatacatgagcccaaagtatcatagtaagaactggtcgctctaggacacacctgcttttatagatctcatatcccacaagtctgtagattttagaaaataccccgccatattccgcgttgcactgcttccaaagtacaaagtaaggaccgagaggactaactcccgagaaatagccggttcattttatgtttggatcttgatcctttaacattcgaactaactcatatcaaaaccagtctctcaatgaagtttctctgctatatttcgaataaattgaacatgcccgtcaagatgttagtctttctttatcgcaacctccgcctgacaccggaagaattcatgaagtactacgaagcgcacgtcaaactcgtcaagaagctggcaggcacggatttccccctttcacatcatcgaaattatatcgcccgcaatacagtcgatattcccccggatggctttaccgcgcgcaatgccttcatcccggcgacgatactccgcgggcgacagccagagttcgactttgacgcctacgccgaacttactttcgcagatcaggtttcctaccaggcctttgcggccaagatctatgccccggatgccgctgcccagataactgctgacgaggatgaattttggatcggttgaaggtgggagtcgccttggtaggggaggtgagagttactgtaaaatgaggtactttcttgtcggagctggtgatcggacttgtttgcgatgcatgttggaagtccgatgtgatcatgaggtataccttcggtgtagtatctttcaacatgagggatattctcaagaacctagtatatgcccaatgaaacgtctttcaagtataactccactaacattcctctatctatactcggtcacgtttgactcccaaaattgcaaaaggaccagatgcataaagccaagacatgtgaagaactcccctcttcgatcatgagatgatctcagtggcttgactcctcagcttatcttatggccccttgaaatggcacatgcttcggtcgcatggtctcggtgctacattggcattccatttatccttctcacaggggccgttcctgcccggcaaaccgggtacattgatatgtgtcagactgcatatccttagaccctaatcagaaccttaaaccagtataaaccctcacttggcttgataataccgctcagttacattcattaacacgagttaggacgaggggggtggatgctacaacgtctgaagatagagcttctaccgatttaatttgttccgggctcctgactgtgcatgagtaaagcatttcatatgacaatgtcacccatccccaaaagtctccacgactgattggtggagggattcttagtcccccacgaggacagataagtcgagttgtgacaaagggatcaagcccaatttcagaatgttacacacttgtgtggtgtgccatgctgttggcgtctactatccatgacacggttagtacagggtatatcataatcgggtcttcatagtgtggggaggatgtactgtggcgctgcttaattgggcgccaacctcatattgatcattggattcgccggtggcttgtcttcctgaatgtgacaatgtgcagaatcctattgatccccccgatatcaatagctgaaacgatgtggccctcttggtcaggcaggtcacccttccggtaacagggtactattgactgtttgagctgtggacaaacgggctgagtagacacaattactattgtccggttgctcaatactccgcgggggaagtcatttgtttgtcgacttctactataaatagtgaggtcatttccctgatgctcgaactcaacaaccttcatcacacaacctcgcttggccgagacaccagaaattttgtccacacactccttcatcatgcaatttgtcattcctttccttctaggcctgagctggctcgccaacgctgcctacatccctgccctgaggaccaaaagcactgagattgtatctcgtgatgctggagagtaccactcggtggcatactttgtgaactgggtaagtttagaccatatacagtgtgtcactggatgaaattggggatataaaaacgtcatcatccaatcattcaattatctaaacaggaagccacgctaattaaactgttcaggccatctacggtcgtaacttccaaccccaggatctccccgctgagcgactgactcatgtgctttatgcatttgccaaccttcaccctgacacaggcgaggtctacctgtccgacccctgggcagacattgacaagcactatgccaatgattcctggaatgattccggagacaatgtctatggctgtgtcaagcagctgttcttactcaagaagagcaacaagaagctcaaggtccttctgtcgattggaggatggacctattctcccagctttgcaactgcctttgacaccgaggatggacggcagaagtttgctgattctgccacggatctgctgaagaacttgggattcgacggtattgatgttgattatgaggtcagtctacagttgccatttggagatgttgatgcttatcaatactacagtaccctgctaccgatgatcaggcggacaaatttgtcgatgcactccgacgacttcgtgaggtatgtgatttcttgatggatatccatgggtcctggctaatcaaattcaggctttggattcctacggctctagtgacgccggaaactatcatttcctgcttactgccgcatctcctgctggtaagttttatttccgtccttggacaattccaaaataactgacacaagtaggcccactccactaccgtcaggaacgtctgaaagagatggaccagtaccttgatttctggaacctcatggcctacgattactccggtagctgggacacagttgccggtcataacgccaacctccacgcctcgaccgacgacccggccagcacgccatttaacacggaccaagccctcgactattacatcggggaaggcgtagctgcaaacaagattgtgctgggaatgccactgtatggtcgagcgtttaccaataccgacggcccgggaaagccatacaatggcgttggatcaggcacatgggagaatggcatttgggactacaagggcctgcctttgcccgactgtaacgtgacagacttgggtcaaataggtgcaagctactgctacaaccaggacagccgactgttcatcagctacgacacgcccgagattgcgcgcatcaaggcgcagtacatccagtcccgcggactgggcggtggaatgtggtgggagagcagctctgataagactggcgaggacagtttgattacaactgtatgtgacgttcttttgatatatgattcaaccgtttactaacatatacacaggttgtggatacacttggaggtgtcgacgctttggagcagagcagcaatcagctgcagtaccctgactccaagtacgttaacttgaagaacggtttcgattagattatgttcatttggctgtcaatattgcaatattggagatttctcgctgacatatgcattgggacatttaactatggctgttatgtgatggacgatgggaagtgcgcctctcgcttgcatctatctcgcacatttatgaagtggaaatactattaagattgaactttgcttgaattgtatggatcggatgtagtagatctagattgtgttgtgttttgctccccaacatcactctccacaaccattgtacaatacatagtgactaactacaaagtatatgtattctatttctcgggcgagagcaatttatactcaaaaataggaattcatatgcatacgagtataattccctttcagccaatgagagtggcctatagacaatattccgccatcacggcccactgtgatgctataacatcataccagagtgaccgcggggccgcggggttctttttcgattaaaatataacttcgtttctcttgtagaaggaaatagtactttgtattgtttcctagcttctagcccgaaatcaaaatgtcgactcaagtatcagacgagaagcctcgcaaatcgctcatcctcaatgcctttgtggaaatgtgtacgaagcccattcataccacttatggagctcatctctgataatcattacaggcagcgggcatcagtcgccaggactatggcgccaccccgaggacgagtcgtatcgcttcaatgatgtcgaccactggatcgagctggcccaattactcgagtcggccaagttccatggcattttcttcgcagatgttctaggtaaataggtcaactgtggcatgttaggcgagaagtctaacaaatatctctttctaggaggatacgatgtctataaaggacccagaaacctcgaacctgctatcatctccggtgctcagtggccagtgaacgagcccttgtctgttgtcccagcgatggcggcggccacgaagaatattggatttggagtgacggtcaccacaagctacgagcagccatatcatcttgcgagacgactgtctacggtcgatcaccttaccaaaggacggtatgtgaagctagtgccagttttgagatcgagttgctaattaaacctttacagcctgggatggaacgtgagtaacacgctgaactcgaagaacgggttcctcaaaggaatatgtactaacaatcccctcaggttgtaacaggatacctcgactctgccgcccgcaatatgggccaagccgagcagctgcatgtaaagcctcacattccatattcacatatacttacaacccactaacaagaaaccagcacgacgaccgctacctcctcgccgaagaatacatcaaagtaacctacaagctatgggagtcctcctggcgccaagacgctgtcatccgcgaccgcgagcgcggcatctacaccgacccaaccggcgtgcgtcaaatcaaccacgtcggcaaatacttcaacgtgcccgggcctcatctttgccagcctagcccacagcgtacaccggtgatcctgcaagccggcacgtcgaaagcaggcaagactttcgccgcgcagcatgcagaggctatcttcgtggcgggccacagcccctccgtagtagcgaagaacgtcagggagattcgcgagcttgcacagagcgagtacggacgtgatccgcagagtatcaagtttctcgcactcctctgccctgtcctcggcaagaccgaggaggaggccgtggagaagttcaagtattaccgcagtctggggtccattgatggagcgcttgcgctgtttggtggctggaccggcattgatctggataagtatggagatgatgaggagctgcgacatgttgagagtaatgctatccggtatgtgataattctccttttcggcttggcagagactgactcgcgatttctgtagctctgctgtggaaggctggtctaaggccacacctgaagtggctaaatggaccaagactactgtcggccaacacatcaccgtcggagggctgggtgccactcctgtcggcacagctgctcaagttgctgattacatggagcgatgggtaaaagaagccgatgtggatgggtttaacctggtaagttgtgttattgaaacagtctgttgtcgagacaattaataacactattcgcaggcatacgcaatcaagcccggctccttcaaggatatcattgatctccttattcccgagcttcgcaagcgaggcctgttctgggacgactatgccgtgcctaagggaacctaccgtgagaacctatacggacaacccggccagtccggaccccatgcagaccaccctgcttcgaggtaccgatggaatgctggcgtggatgcttctgatgctgtcatcccggagaactgaatgctatacctgacatcatttaagaaattgaattgcaatgaccaacaaataattagaacaatcaatttttagacagactatccgtagattacctgcaaggcccgcacaggacctgttctatggacgccaagaaaatgcagattttgtacacaatcataaccaaagctctaagtcaacatgtcatcgagacgctcaccaaggaccttctcgatctgcttaacccatctacggacctctctctcaacactctcatcctcgtcttccataagctcactgatgtaaggcagcatctctggcagaagtgccagccactcctcacccagttgctccgtaagagcctgttcggtcttgagggctgcgagacgggtgtgggggctgtcgccaccagcgaagcgggcgttgggcgcagaggaggggcgcaggtatttcatcagcgcggagttcagctccttgtggttatctgtggagtcggcggcgatggccagttcagtgattgtgggcacgacgtcggcaatgaccatgttcgaggtggtggtgctgtttgcgtggccgagctgggcgatcaaaggaccggaaatgctggcgagatgggaggggctttgccagaattctgcatagatgttagtggccgtaatgagctatattgggcgcagagggaacctaccatcctggtcatgctcgaaggacttgcggagcatacgaagggcagccaaccagagggacttttgggccttggagggacccgtcgtgtttagaacactgacaacgttctccaacacatagctggagtacccggtgacaattgactgaagaagatattagcgagattaatgtatggaaaaattgcgaggtaacatacctggagagtaccaaagaagacctcgaggaacttgtagaaagtcgtgaggcgcgaggtttgatcctgttcgttcttgggagcgccggtagtggcccattcaacaaacttgaggaagatgggccggaacgtgctgtcattcagcttgtagatcatcttgattgtaacgtcattgagtgccacttcggcctcatcaatagcagtcgattcgaagacagccttgtcgccaagagcaatctgttcccggcgaagatcgaacgccttgaagagaatcttcgtaaggacgccgatgttcttcgcaatggccgacttggggtgcttgtcaacagcaatcgtgacaacttccaagagttcgttcacagcaatcgggccagccttgacggcgtgctgccaattccgatcgacggcgccgagagttgcgcccagatccaccttgcgggccatcaaccgcagggactcctggcggctttcatcactgctctcctcgatgtccgcattagcagacttgaaggacaggagaagcatcttgtccagatcgccagccgagatcatgaatggcaggtgagcgaaaagggcagagaagagggtgaagacggcgtcgtggagtcgcgagttctccttgccagggaccagactcaactcgagcaattctaatgaacgcttgagtgtgtccgggagggcaggaatcatggcttgacccagcacctcagccatagaggccaagcacaggatacccatgtagcgaatgcggtcatcggattggccgaggcaagattcactggcaaccactctagcggcagcaatgaccttggacgggtccttacggccgtacttgtcggtgatgcggtcaatgcacgaaacagcagcatgcttgagcagcgtatccggagacgactcgacaatgctaaccagggtgggcaagaagtcgagaacccggatctgcgacaggttgtcacgctcggggttctggcggaggcgagtctcgagcaaacggagaaccttgcgtcgaagttcgtcattgggaccctggagtagaacctcaatggtatccaggaagtcgacgagagacagagtgctaaacagagagccgaggacctcaccacaagcctggctgacgggcttcatactctgcacagcctcgccgatgctcagcacctgggtcagaactcgggagaagcaagcgcgggactgatcagcaaactcgtcgtccgactcaaaggccgtctcaagcttggacttgagagaagagtgcttgaacaagtgagcaagatcacgcaggagatcaacgcagatgctctgggcgtcgcgtccatcgtcactgccaattccaagaagaacctgagagatacctggtttggtcttgagagcatcgctgaccaagttcaagtacttgctgtaggtggtaagctctacgacagttgtagtgtcagagaccagaccagtcatcagagtgagcacatccttgtcggtggagtatcgattagcgagcattgccagaacggcgaacaggaagtcttgtgttcccagcttgctgatcaaggcatggaagagtctcaagcggcgatgggcggggatgtgctcgaaggctgcagtgaaactgagcagtagctcggatgttccggagacaacatccctcttctggttacgcagagactggataagagcaggaacaacttggtcaatggtttggtcaatgaccgaaacagagtagtcatcatccttgcgtagaacggtagtgcccatgaacgtgaagatcggcatgacgctgtggagaaccaactcgggcgcaatgacagacagactacctacgagaagaagagcgccgttctgaacctgcgggctgtcggttgttcggacacaatccaccaccaggtcggccctgatgacggatgtatcgaacttcggcttaacagatcccttagatgtgttcacaatagccaagagacttcccaaagtcaggctgaggagatagctcatgccagactggatctgggacttgaagtgatgaagagccgctagagtctggaacaatccacctgcaagctcaggatgagtttctggggaggagctatccacgatctccaagatgaaagtcatcttgtccatcaaattgctaagctctgcttcgtccttgacagtcatcgcaatcatgttgttctggctagtacgtctccgcttcggtgctggaccaacagactcaacatcggtgatagacacaggaatcttttggacaaattgctgaagaacagcaccggaaagctcgacagtgcgaagaacgtcgcggcagttattcgccagagaagcggcattgaccgatcgcgaaagagagatatcgagcaacttctcggatgcagtcaactgacgttcttcgggaatcttagcccagatgtgtttgatttgaccaaagcaagccgcaacaaaggacgggcgcaaatcaccaccagagctgacattggagaggagaacatcgatggcgtccttgtctttggatgtgacaatagcagcaatcaaattctctgtctcagatgccacgatgcgctccttgccacaaatttcctcgacttccttgtcgctcaagcgacgccaatcctcgagcaccgggagaagctcactggtcagggttgcagtagagaccttctccacgctgtttaccaacttcagcaagctaatcttgggtgcgaacactggcatcttgacaacatgagagcagatgaacgcaaagagactaaggcggagagacttcttgagttcggatgcacccgaagcttcggacagaacgttgccccgaagagtagcttccaccatcctaccgacatggttagagtcaaggatagactcctccaaccctggaagcaatgcccgctccaaaatcttttgcgaatccttggtggtcagccatgcaacacccgtggattgcttgcccttgccgtagattgagtcgtgagcccatggcttcgagctgtcaccggaagtggtgttctttttgtacaaagatccgataatagccaagatgccagcagtctgacggcgaatccgttctgaaggatcagagagggctacaaacaggaatggcagtagtgcctgagggtcaaagtccgcgggtgccgacgaaagaacagatgatacaacgttcaaagcagcgatctttgttccgatggggtagtggccagcaacgactctgacaaagaaggatagatattgaggtgttttgatcgcctgggacttgcccaagattggcaaattggtgaaaagctcgagattgtcctcggagtccaccgccaaggcgaaaacgcgaaccaggttatcgaattcgatgatagactgtttggagaggaaggagtatgggaacaaggactctttgatcaaagactccaaggctggggtaaacgcatccacctggggctgatcatccgcatcgatcatatccacatcttcgatggcctgtgccacaactggggcctcgacaacggtctgaaggttgtgctctagcgccgagatgttgagcgaagattcagtcaaaaccttctggaaaataggttgcagagtttcagaccggttgaatccttgaaccagttcagcaagctgtgtctgggcatccaaagacattccgcgggtatcatctgcattggaagctgcttcgagaaccaggctcatagccttggcaatctcattctcaccaagcatcttgcgttcaaagacggaggccagaattgcaaggcgagcattgtcctgcttgtcaagatcagtcaagcaaccggcaatgactccaagcaataaatttgatgtctgatattgtggcgcgatttcagaaagttgggcgataggattctcgaggcgcaagatgcccttaaagacccttttggggattgtaacagtaggcttctgctgtgcaaggactgaaagacaaatcagaccagatatctttgtatcttctgtccaagaacccacaacactctccattaggccatcggtaacttcgttcgagaggaaggccttctgtgccagtacaacgcagatcatataggagccaacgatcaattccgaaacattcttcattgtgaaagcgttactgagtaccggcaaaatccgcaaaaggatatcttcatgcttttgcttctcggcctctcttctccccgagcgagcgccatccaacattgttgcgacagcctccgtgacaattccggcccaaaatgcaagtagtgcatggctttgggcctgttgcctacaaactttcaggacgtattcgtttaattcggaaaagaaaggcttgttcgtggctgcgctatgaacaagcgggtgccttggtggattaatgagaccgttcttgtatggaataaggactttgaatgctggcgtaagagtttccggaagaatagagagaaggttcaagaagagcggcgtcgtatgatacggcaaaaacgtcaataatacggcggttgtgttgaactcgtggatcctgtcacataagtcagccaccactcctcacgatctgcacctcccctcacaatttattcttacctgaaccttctaacaagccaatccacagctttcactgcaggactcaactggagcctgccgccaaccagagctaggaaagcttcaaccacagtatccagttctttattctgggctacgttcatctgactgcggtcctccgctttgctctgctcgctgaatatcgtgcgatcaaactccgtaaaccgggggtccaacgagcataactcccggaatccgtcataacaaatatcatagatcgcatcgaagtcttgagtgccggcgacttttgggtcaaaaataagtgattgtgagtgtaacaccctttgcgccttaaggtcaagctcgtgtgccgacttggccgcaatttgcgacagctgcgcggcgagagacgaagccattgtgaagtctcttttggcgggctgttccgcggacttttcttgttatttttgtattggtgctcacacaattgcacagtgacccatatccctaagacttttgagggtagtctttctttttctttgcgaaccgagggcaggttcaaacaatttgaggtaagtcttcagctttgcttgaccaaaagcaaatggttgacttttttttttgccagccatcccgaccgcctatcggagaatgattcttccgggttatcagaccgcggcgcgactcgataaggaagatcgagccaccacgatggactcacctgggtctcaggttagttagcctttacttacatcttagtaaataagaggcacagactgacgaaaataaagggtgtcccgcaattctccagcttccaacctccccctaccgctcctccggcccccgctaccggctcggaccatgaacgtcgccggcgtcgctcgcgccatcgtcgtcgcgcagaccgcaaagagtctccacgctcacgtcgccatgaaccgcgttcggacggttaccgtcaacaggcgacagatgaaaaatttgagaagcgcctgagtggggaaggaattgccgatctaaacgctacaaaagatgagccgaataaaggattcgtcgtcgacagccgcggcgatcgcgacaatacacgttacggcgtggatcgttacgaggtccctgcataccaccgcaatggcaatggttttgtacttgggctccccggccagcgcattgattaccaaacgcgatatgaccaaggccctcttctccttcttcgccccgactcaggctcgtcaacctccgcagtcaagcccctctccgccgaaaccctgtctgctttgtccgccaatcttcccgttcgcctccggtctgatcttaatgccaaccttgctgccgagaactcacatacacaaaatttcatctcaacaacagtcccatctcaatccggcgttgcgacaactgccaacctagatgatgaaccaccgtcttatcgctctatcgagatcccggataaatccgaagaacaagcgactgaggatgatgcgaagaccttcattcgtcttgctgtcgaagctgagattttgaatcgcaatgccaagttgaacagcgcagtggcacaacatcctaatgatattcaagcatggatccgtcttgctgagcatcaagaacttgccgtcaccggcgggacatctggcgatcggtcttcctatcgcgatcatatacaacttgtggcaagagccaagctttatgtgtatgaaagagcgatcaaggccaacgcacaaaacccagaacgcgatcatcttgtgctgggccgtatggaagaaggcgcgaaagtctgggactccacaaaactttcattggaatgggacggagtcctccgccgtcactctgagttcatcaatatatggattgagtatcttgactactgtcagactgacagtcaggattttaactttgacacttgcttcaagacttatgcctactgtttgaagctacattcacgtgtcggcttcgggccgcggaaaactcttatcaggtcatacttgctgctccgtttgaccctgtttcttcgagaatcgggccacgtagagctagctgtcggtatatggcaagcggtgctcgaattcacatgcttccggtcagcacatctaaagggaaagagagaagaggccctagttgagtttgaaaagctctggaaacctgggcacatccggattggggagcctcattggcaaccctggaacagtggacaaacctcccgtccctctatcaacgagcatgtttacacttctgaggcgaataccacagagttgttcccatcctgggtacgtgcagagagagagcggatgttcaaaaatcgcatgccgtcacatgcctttggtgaaactggagagaatgacggtttccgagtagtccttcttgaagatctcacgcagatacttccttatttcttggatttggaagaaagccttggttccctagttgatggcttcttgtatttctgccatttgcctcacttgacaatgcctgcgaatatgcacaccagccggctgtggaccggtgacaatttcgtgcgaaacgaatatatggatgatcctcgaaacacaatcgcggactggatcacttttgagaagtttgcctcaaccacaagccttgcgcctttcgcattccctcatcagaccttcgttcacaccaccgatactcttttcgccgatccaaagctgtggttctctgctttaacgaagtgggctgcaaccacctctcattcttcctgtgtcatcgatcccgactttgtaatcttgactctccatgcccttgtcgatatcttcaaagatagccaattggctgaatacgctattgcagtcactttcgcgtgtgacaacgctctgggcaagaaatacggaaagagactcttgaaggaacgatcatcaaatctgagactttataatgccgttgcgctcatgtattggcggactggcgatcttgatgttgctcacaatgtgtggtccaccgctttgtctatgagccagaattttgacgcccgcgagctcactgactctgcacttctgtggaactcttggatatgggaaatgcttcacgctgggaacaagaatcgtgcttcatacctgttgcaggccatgccttataatcgagtccacttgctatcatacgacacagctgatgaacttgaaatcaatgaaaccacttttcttagggtcaagaaggcaagttctcattcgttgatctcactgaatgctgtcctaaccatccacagtgcttgtttgccgctcagaggaatgccttgaagttcaagaaaatgcaagcatatgtagcttacgtcgactgctatgccatcgccctctatctcatgggcgagcagcttgaagaagttcttgatgtctacaatgacgccgccacttctcttagagtcttacccaggactgatgatgattccagggtgtttggcggagaattgctacaccaagcacgagcacggatcatttaccactatgtggagaagcagagtggtcaattcagacccgctgacattcgtgcgcagctcctggatagcctggaatggtggcctcacaacaccatgttcttgtcgctgttcaaatggaacgacgctcgtttgaatctgagcgatcgaacccgcgatatcttcgacgtcactatcggggcgaaggccagggccgcccggcatctgcaagggcctgccccaatctaccgtgtacccgtcacaactcacctttttagcatctatgctgagatgggtcgccctctcctactcggttcgaccgcgcactccattcgggcagccttcgagcgggcgattggtgatcatggcatactcccgatcgggcggaccccaactcgaaagagtccttttgagctggcgagctcaacctccgcgcggaccagcctcaccatctggaggctgtacattctctacgagctgtacgcggagtacaacgtcggccgcgcccgcgagatcttcttccgggccctgcgctcttgcccctggtcgaaggagctgtacctactcgccttcgagcacttgcgggcggatttgaccgaccgcctgccccccccccccctccaccggccggggnnnnnnnnnnnnnnnnnnnnnnnnnnnnnnnnnnnnnnnnnnnnnnnnnnnnnnnnnnnnnnnnnnnnnnnnnnnnnnnnnnnnnnnnnnnnnnnnnnnnnnnnnnnnnnnnnnnnnnnnnnnnnnnnnnnnnnnnnnnnnnnnnnnnnnnnnnnnncgggcgtatttgcccgcccgcctgccccccctcagtctcaaccggcagggagaggtcagctcgtcggggttcaacgctgcagagcttcgggctttgtacttggagatgctgcgtcgtggactccgtattcactactacttggaggaccctatgggccgagtaggcccagagggggtctgatactggcggctgggcggtggaggaggagaggggagagaagagtggagaatacaagaccatgagcgggtgaagggggtgacctagatgggataaaagtaatatcatccaattcaaaagtaaaaaccccgtgctttgctcgatatccgggggtctagcagcgtagcaacgtagggagtctcgaatcgatcacaactttggtccaaacctcggacactttccacactaaagtcctggatgaacaatctcctcacaactgcagaatcattgtgccactgagcggaggacgcgaggtgggaatttgatttttaccaatcttgcggaccttcatttagtctaggtatgtcaatataaaacagcttctcgtgaacttcatggcaggcaaatgggacaaaattgtagttacaatgggcctactaaataaaggagccaacatatcaatccaaatagagtaaatgccatcgccgttatataatctttctttattagatacaactatgcttcctcactaaagaaccgattcttaggtctcggtaggccaaagtgctcacgcagtgtcgaaccggtatactctttgcggaaaagacctcttcgctggagttcaggaatcaattgatccgtcacctcttccaggccctgtggcaagaacggaaacgtgcacgtgaaaccatcagaagcttcctcgcgcaaccagatctccatttcatcggcgatatcgcttggcgaaccgaggaatgtcagccctgagtatccaccatatcgttgggcaagctggcggatcgtgagtccctctttcttggctagcttttcaacggactccctgctcgtcttgctcgcattggtctcgggcagatcgtctggcaatagactatccggatcaaggccactgacatccactccaagtgagattgacaaggaagcgatggcactgtcgtaatgcaccagactatccaacttgagtctcttctcctgcgcatcttgcttgctatccccaacgataatcattgccgcgggtaaaattttcaagagatctctcttccgtccggccttctccactcgccccttgatatccgcatagagtgccttcgcactatcaatatcctttggactgcaaaacacaacctcggcagtctcagccgcaagctgtcgtcctggctcgctttgcccagcctgaacgataactggccatccctggggtggcctggcaatattcaacggccctcgaaccttcaactcatcaccggaatggttcagcacgtgcattttcgcaggatcgaaatattctcccgtctcgacgttgcgagtgaaagcatcatcggcaaaactatcccacagcccggtgacgacatcataaaattcgcgggcacgcttatatcgatcaccatgggccagatgctcatcgaagccgaaattatggctcgactctgggtttccggtagtcacgatattccacgctgctcgcccaccactcaggtgatcgagactggcaaatcgccgggcaacatgatatggtgcgtcgtaagtcgtactagcagtagcagcaagaccgatcttctccgtcacggaagagagagcggagagcagagtaaatggctcgaatgaggtgaccgtgtgactgcgcttgagagcttcgacgggcatgttcagcacggcgagatgatcagccatgaagaaggcatcgaacttggcggcctctagcttttgggcgaactgggcaatgtgtttgaaattgaagttggcgtcgggatatgagcccggatagcgccatgcacccgtgtgtagcgagactggccgcatgaaggccgtgaggtgcagctgacggttgggttgcgagtcggtcattgtggagttgatttgggtatcctctaggttggatttttcaatctttccagatgtgattcatacaaataggttaattagaatcgctggggttatatactctgtaccccgcctgttgtggcatttccaagccgatttataagcctcgctcacttggccttgatatggcgtgcttagagctgcgtaactatatatagctgtgtatagttgtccaaccattctgaggtcctcatttatcgcaaatcttatactttgaaaccctctagtcaagaaaatattgaacgaggggtaccctctgttgaaattcaatctgctgtctatgtagaatgacacaataaaaaaatccaaaggaagcaaagaagaagcagaaaacaaggcactcggatgcatggcagatcaaatacctgcgtacatacgtaggagaattctagacctcatacaagccaagcaaagcaagaaaaagaagcaagcaaaaagtcgaaaagacgaactccccttatctgcgtaaacaggcagtggaatttatcgcaaccgaacctaagtggccccggttatctctttgatgtccgcaataagatcctcaatgtgggtgaagttggcagtcagtgtttcctcccgacccgcaaaaagcaagccgactaccacatgatctcttttggtataaaccaaggaaccggactctccaggacgtgcaaaaagacggaaatcggtgccgctggctatcacggtatgttccaccgtcggaacagaagttttaattccatcaatcatttcgtgcttgacatgagcctctttgagggagtagtcgcccccggagtacccggagcgttgtcccgaaaggcacagccttaagttgtcgatcttgtcaggtaggggcgatccctggagtacatgccgcccgggagtctaatgaacagttagattcagcgtatatagtaaggctttcttccaatagccaaactcacgacgttgctcgacaatccatcatccggtacctcgaccaagccccaatcgcagttgatacggtgtccatttgcaccctgtcttgtcctgagcccggatgccacccagacactcccgaatcttgggtcaaaatctttgatattgtcaaggaaaccccgcaaataggacaattccttctcgttcttcagatatttggttttctccgttggtcgaacattctgtttatgggtaacgagtaccccagagagctggtgagccgatgtgtcgattttctcaatctcctcatctagcgcggttctcttctctcggatcgcacgagagctggggtgatagactgtcaaattgcgtgaacttgtttcattggggccgatgccgaattcgggccatcgtctgattatcctgatcgtcgcccgcggcttaccctcctccgttcggttgatgacatggaagcatgttacggtaacaactttctgtgtgccgtcgggcgatgcggaatatattaaagtcaaggccaatgtttaagctggagctccttggtaattcttgcgtgcacttgaagatatatcaaaggataggggtgttccgactccaaaggccaaaattgaaatggaagtcgggatttgggatcgtgatttcgaaattgatgtgaccaagctggttttcggatagattttgccagatttggcgacaggcttgtacccaagtgtcgctaaatgtgtcacgagttgcagtgatgatcaaagtcggcgcgggttccttaacctttagaggccagtatttgtattgacattttttgatcttgatggatgttgcattgactttgtactgaccaagaaccgaaagaatcattttatgaactctgatggtttcgaaaactgtccataaaggggacttgccgtccagattgaaaactatcacgggtagggaacagagatatggccctccagcgcgattttgctcattgatgaatccatctgaatcgacctgccactggcccgggtcgtgaatactatcgcagctggtccgaacacgctggccatctcgaagaggagaggcgtatgctgctaggacttgggagcttctcctcctcctcctctgattcagcatcatgctgagacgatttatcaaagctttcgatggaggacgattcagatttggcaccagaggagctattcgaaaccgcagaagagtacccatcagaggagccaccagggaacgtgttgagcatggcgctagggtctttctggctagagctgggggtatgaaattggtcgttctcagagcagctgtcacataggatgccagtttgaacttcactaccacggtcatactgagcagacatgtctaataaagtgctagtgctgacttcgagattcttctgggcaggcgggccaaacgaatccccttctctcgatttaggttgtatcgcaatagaagtctcagttgtgtgccactgcacaggcacgctggtttcgatgtcacagttcccctcggcagacgggtcaggcatgatgacagtgtcagtgtcagtgtcagtgttaaactgagcaggtatatctgacgaagcgctagctttttcttgagtaggcagttcaagcaactctatgggtagaggcttgaggctcatctctgtagaaatctcagggatgattatttgaaggtacaaatgataaaagtgaagtgatgtagaagagaaagaaagtggagtgggtggagaagatatgcggctcgacggccttggtaaaccttaaatttggatacacagggtcacgtgatgaactatttgtctcacaggggcatcctcatccacaacacacccaaagcgtctcattattagacccacaattttcccaatagcctgatactcatgtgatcaagtgctacaaactttcctaggaggaggtagtatcaggaccatcgcatttgattgaacatgtaccgacacctatccacgcgtgtttggtgctacgttcgtatgatacaaggcccaaagcaatattgccagtcaatcacgaaacattcacgcatgctctattctcactcaggtaggtatgcctgcctaaacgtgatttaacattcactcattcgtatcagactggaattctgacgatgaattctttaaattcacgcgtagtcgctttcttgtagacgaggcggaaaaccttcgaaggcgagagatcaaattcaacttgaataggctcgcaagtgttgcggcggactcaatcggcgctgctcaatgcatttccatcatcaagtaccccgacggtatgttcaacaaaacattccttatgacgatggaagatggccgagaagtcgtagctaaggtgcctaaccctaattctggtattccccactttaccatggccagtgaatttgccacgacggacttcgtaggtttatttgaaactcggtcgacgccaaatcttgctaatgcgactggattggggggctcgcaaaaatcctcaacacaccagcacgtcatgtccaggtatggaactcgcaagcaaagtcacatcctgttggggctgaatttattatcatggctaaaattgagggtatcccgctgtcccaagtctggagcacgatgcaagtacactagaggcttaaagttattcttgccatgacaagtttgcgaaagcaatggctcagcgtttcattctcacattacggtagcttgtactacgctagagacgtgcagttcccagcaggcaaccactatgtcaaggatggcatggccgtcaaagattcagagtttgctattggccccgctactggtcgggattggtttgatgcgggcagatcaattttggatattgaaagaagaccatgtacgtcagagtctgtattttctttctctcagctgctgacgagttcgtaggggcttctccaacgcagtacctgcaagccgtcggaacgcgggagattaaagcaatccaatttctgaaaccacccaaacagactgccttattctgtggcccaaagctccaccaaccggacgcagaaaagaagcttaccgcgctagcatggtaccaaaagatcgtcgatgccattatcccaaaggacacctctattaccaacccatatctctggcatgatgatttgcatgatgacaacatcttcgtagacccagacaaccctgaaaggattacgggtatcattgactggcagtcttgccgcatctcacccctcatcagccataacctcgatccagctttcctcgactgggatggccttgagccagaaacgctcgatctagcaccaagaccgacactcgctaggctttcccccgacgaacggtccgcggctatgcacgagtatacagttcaaaatgtgttcattggatggcgaaatctcatgcgtgctaagaatccagacttatatcgggtagtcgaattccgaaagacggcagcgttcggactgatatttctcgcccaccgcatgttcgaatacggtgaaccgcacttcctatcgcttctagtcgatttgaaggacatgtgggcggacttacccggcgtcattagcgacattccattcccatttgagttttcggaaacggacttggagcgcatcaagctggactgcgataaaagtacggagtaattgtcgtagtggcctgattcgtcgcccgtagtccgctgcagggttaccataagttataacttagggcaggcttcgatgcgcagtgttgatataggtcataataaatgccatggtctctatttattgtctagagagtgctatatcggttctgtttcttattggatattattcaaagaacattgtcaagtctattgccatatattcctaccacccagcattcccaccgtatccacgtatattgattgcttctcgccgctcgattcattcatactctcaagatgtaaaatccgtttagaagagctaacatagagagttcatgaaatcatagaaaagtataacaaaaagagagattcgtgattcgtgtcatatatgatagaacaaaaacaagaaaaagcaaaggggcaccagaaacaagactagaagtgttccttccagaatttgaaccggacatccctggttgatgaatatttggccgcatcgctaatctgcatggcagcagtattaggaccacagaaataaacaccaatttcggtggtagcagcgctctgcagacccgtcatgtaggactggtccagcaagccaagccgcatagccgtgaagagtcgcttgaagtccggacgaccaaagttcgtccgactctttagctcggtgagagggtcaagggcctgcccgacagagttgaggtagatatttgcagcggtatcggcgtcgagacgctgtgtgaggtaggtgtggatacgcaagaactcggtgcttccctcgctagcagcggtgttggcggattgggcttcgagggaagatagcagagcttggaaccactcaaatgacgaggtatccttacagacccagataaactcaacacgtcgcagtcggcgaggagggtttggacttgagcggagatgccaaatgttcttgagaatagatgcccagggtgtgacgccgatgccggtgccgatgagcacggcgatttcgttgtcgaacacgtcttcggcgggtgcaccatatggtccatcgatgcgaatggagggcatggtctgtccgttctgcagggcaacttcgtacatgccgttgggatcgagaccttcaaggtctttggcttgggcgggaccgcaaccgagtgcatctccaagtgctcgggtgaaatctccgacttgacggacgtgaatgctgagatatggatcaaaaggacaggaggtaatggtgaatggatgccattgggtgctggaaacatcaggcacttgaaggaataaccattgtcctgctttgtacttcatgcttggtttgtggaactggatctccatggcggctgaggttcttttgttagctgaggtcaattcaacatttgcgagagaagatcataccataaggatggcgaatgacttttgtgatgactgtcacgcgccgggatcggatctccctgtacagtcgttcgaagagatacaaagttccaatgaccaactcccatctccatccttcatagccaagacaatgattccagaactgtttccctgcgaaaggagagatagggctcgcggtatcccggacaaagcacccagtggagtgggtgtagagagctagcatgaacggaataaaaaggtgatgcgcataccagaaggtttcatatgcttgttggcggatgcggtgatgtgcggttgtatacatgagcatcatgcacaagagcatgacatggccagtgataccacctgcgcgagcaaaatggatctccactgcaagttctgggcggagttgcctcttttcgatgtggtagaagctacttagtgtcagtaaagtacccgcgacaagctgtatgaggaagcagcctacttgacatagtgagcagcagtgtgaatagccgtgaatactagtatagaataagctatttgccgatggaaccacgccgattcatctagtggtagccatttgatctgtggtctgagccatcggaggacgttccgacacataggaaataggattaaagtgcaatcgatggaaagaacgagacctgcacctcgcgatatccagactgaatagccaagtgtatttagtgacgccaactttggatttgatgcctgcaggtacctataagaatgtcagcaacaagatctagaagtagaacatcagaatacataccatcctgcagcaaaaatcccaatatgtacaccccaaaagaacaaatggaacaagaccttcgaaacggtcaagttcgccctcttccaccaggaatcttgagctgcggccattctttctctgtgcttttgagaatgtcgaccagcgacaagtatttaggcaataaactaatcaaaggagtgacgggtccagacggttgaccagcaacccggtaatatacactgaaattctgtcgaaagcgaaatctcctggctcccttttgtggcaagactccagtgtcaattttgaccggtcggtgctttcagagttcgtcaacggcgttgtttctccatgaatttggcgtaaatcaagatttcctggggtaattttcgcttcgaagttgaagagcggatttgaaaaaaaatccaaatactgttgaacgcctcgcacaaggaaaagtacgctcgaaacttgtgatagtactcaatcaagatgtatagaaataggatgtgagttgtgcgccttgtcgcgagcgctcttgccgggggattcccctgcacgtgtcctctcgaataaaagaggttattgacacacttgagataaatatgaaatcgatttgattcaagctggtccagacatggttgacgtcaatagatggaataagggcaagatcggagatgggttggaggttcagagaatcccagtgttgtggttttagctgcagggatggggggcagccgatctataattacatcgcttctggcgggcaatactccgtttaaccgactacgtacacgagtctacaatgtctgtgcttttagaattctcctatgaatgagtggtaggaagaccaagagaggaagtccagaggctagaatcttgatcgcttgaaaatcctcgttagtttttgcctgttctctcccgactgctgtcttggctgattcttccaagcctttcaaaagccctgcttttgatcctgggcctgggattttattaatactctgagaagtgtgctatttttaatgaccgttcgtagcaggtacaccaatcatgaaacgaagtttatacgccctagagtccgaccaccgtgccatgttccccgcgaagaagcgagtctagtgggaaaaaggaagcaccctgttcgaccaatcctatccaattcggcagttttccctgatcataacaggcttgaacaggtgcaagctaaatcggtcgccgaagttcaaagagattaatggcccgggggtggcagagaggctggtgactgggcaacgtcaaactaggccagggaaagaaggttgctaagaggttggcctatcagaggcctcctgcaagcgctgttctctcgtcacacggagccccgagggtcgcccagcgtcggtgaaaaggcaaaaagcctgccattctgttcaggatccatacggcggagagaatagaagtttcgccaaatatagatcagtgatgatttgaactatattgcgtgttttccataaactataccttttttccgataaaattctccacttggcactgcaagttaaatcaggcacgggctgactctgcagaagatgcagaaagacggtgtgttgcactgaattggaatcagggctactgtggtcatctgatctggatgttccaaacttgtctctacaacaaaactgagaccatgcagacaaccccggacaatccaaaaaacacaggcctcggttcaaatccccaggaataataaaaatacaattcgaatgtccatgagacttgaaaatgaaagcccctgtgcgtgccatgcatgcacctgcagttcatcacgccaagcccaagcgctctggcctgtgatttgccgacatccacttcgcgatccgctccgtcacatcctccgctcgccaatcacacagacttcaacaagctcaggaagaggggtgtcaaggattcggggacctttcggccagtgattggtctacgatgcttgtatctgtgcggatcacgctttaatcctatccttcttgcatgtgtcccaaccccatgcagctcgtcaccttttggcgctcgaccatcacatcctggcaaagtgttccgagtttgtttgagttatcagaggggtgatttgtctaagtatagactcttatacctaaccccccgcctgcacgcatgtcactcggaacatactttttttttcttccccatacgaactacggtaccacgataagcccttgcaatatatccgctctccatgtgctcggattatccaactcaataaacatctctatgtcttgctggatcgtatgatgaagtgattctctcacagaatctgccgcaactatttggggtttgcgacatctgtcgcccaagattagccttgcactttgtcacacaagtgactttatttcctccgaggtcttcgctagctaaagcttttccacgcacaacaatacagttcccatagttcaacaaaatgggcaggctcatcaagaaccactgggggcgcttaatcatcctcaccgcagcagcttgtacgttgctatctaaacccccaagtcgaagccggcactgacatattcaaacagaccaagtcgccagcgctatcgagggctttatctggcccaaggtattctgggactttatctccaggaacctcgatgcggccgtcgccccagtacccgttcttcaaatcctaaatctcgtcatgggcctcgtgggcatagcctgggaatggcctctcaagccatttgctggctcactaccgcaccgcagcattgaaatccgtctcatcatataccccctcaacgccctcctcgcggcgcttctctatcaaggcaccgaccctgcaatatattatttgattggcatcggtgtctatttctgggcctacagtgaaggcgaggtatgttgcgcatatttttgacataggttgttcttatgctaacgagtggatataggtcgtctgcccggagccttggaccttgccgaaacgacatggactatttaaagcataacattggttcagtctggtgcattgagtgtagcagacacatatcatttagatatcctaatacataatgaatttgatgacttgaaagagaagcatggcttgtatcattaatctccatcatcgtcatagagaatgcgtggggaatattcctcctgcagaattctcaacttgcatagacctaaattatcattttctccaattgacagtcataaaactgttcacttctcatattctcatcatacgttgatgccttgtcaaggaggcataaacacgtggacgacccacctggcacgtgataccctattcaaactccaagaaaaacgtcatcttgacaataatactttcatgaaagctcaagaagatccagaagatacattataaatgccttgtgcatcgtttatatgtcatggacgactttagggctgcttggaacccgagaactaaccaaatctgactgacaccaaacaagatggctccgtctacagaaatccaatccaaagtcgaggaagacgagctcgcccttgaaactgtcgaggatgtcccagtcaacaaactcaccagcttcaatggccgactgcagcaatacctgcatagcgggaccgcagcgcacgaagccccaactgcctctcggggtactatatcgcaacgccgcataaacaccaagaccgaatataaaccagacattaccgaacgtcaagcaaaagccacaatatccagcccaaggcgcaagagaacagcgtcagcaacctcatgcaccacccgctcaaagtcgaccacaatagccacgcctccatccccaatcccacctcgccaaagcccaaacaaacgcaagcgcagcacagcaaatccccaaaccccacccatacccgcaatcgccggcccttcagcgacagaatccctccttcgcgacacaatccccccaaacctgatcctcctactcgtaggcgtgaatcccggaataatgaccggcgtaacggggtacgcctacgcgcatccgtccaacctattctggaaactgctctattcatcagggataacaagtgtccgccaaatacccgccgatacatacaagcttccggcgctgtacagcgtgggcaacacgaacatcgtggagcggccgacgcgcgacgcgagcatgctcagtcgcgcggagatggatgccggcgtgccggtgctcgaagcaaaggttgctgcgcagaggcctgaggttgtttgtcttgttggaaagagtatttgggaggctgtttggcgggttagacatgggagggggattcggaaggaggagtttcggtatgggtggcaggcggagacggagaatatgggtcgggttgatgattgggctggggcgccggttttcgtagctacgacgactagtgggcttgcggcggggatgaagccggcggagaaggaggctgtttgggcggagttgggaagttgggttgtgaggaggaggggagagagggggttggatcctgtggtggttaaggaggaggtttgatatgggtttgcgattttctgtggctttcatttgtatagatgatgtcgctgtaccatatactatcataagctatgaccattgcttttaaatatattgaacggctttacaaatgggaatgttcgggattaagttaaaagtatttgtatttatttgtaagacgagtgaggttgctcatcattcattatctcataatatcaggtgcagaagcctgttgagtaccaagatgcaaagatgcaaacccagaaacagcaaaaactccctctaagcccattccagggctaaagattgagggtgttgcatgacgtttccccaaatgatcaagcgccaaagtgccatacaacggacgatcgagggatgtgaatatctcagtagaggtcaatgtgaggggtaaaggaagggaggtagttgtccagggcgtggttcaatagaacatcgatgcctggctagcctccccattaaccccgaaaggagtagagggtagatttagcggctgccgttggagtcattcttgccgccctcacgctcgcgtgcctgttgaagttgagttagtatacagaacctcgcaattgatgcaccgaagtggaactgaaacttacagtggaagcctggaattcgccgccttctaggatcttgaccatgcattcatcctcgttggatgtaccgaattcgttctgaagagagctcttgctggcagtgtcaaggacgccctgggctccgtggctgcatccagatgttaatgatctgacgtatagtaaaagaagtttgaaacacttacgagtgagtcaggaagatcttccagccattaagaacttcggtcaggggaatgctgcggtcgctcttccacttctgtagactctcgatatcatccacaaagacaacgaagtcgtctgagctacccttgtagaagatcttagaagcagtgtcgtttccgcgagccatattgaaaggatgtgaggtttgaggttgagagattgaatagatttcaagatttgaagatttgaagatatcagaaagatattgatgaatgagaagaagggaaaggtaaaaggtggtggtttaatagtccgaggtgggagagctcaggtgatgatgactgatgacgtcaccctatgagctgatgcaaatagaagaagctcgcgtgttttgttcacgtcctctgcagtctgaatgggacaactaaccacaattagtcagagtggatagggcttaaatggcgtttgtcgttctagtcccttgcttcactacagttcttacacagcgcgccaactattccagcaaagacgacgtcataggagctcccctgcccgctgtcggatccgctgtgacgccaaacgtggggtagttctgaaagagccaagtggcaagttggaggataaagaggactctgctggtattccaattaataattacttatagtccaagccacaattacgtttttgggttaattataatccctccttgacttcaatgctcccgccgaatgtaccagaaccatctcaaaaggacaacgtaaaaataggaacctcactcagcatcggagcgggtctttttcagcttcttgggtgccaaggcactaaacagattcttcggagatgaccacttttggggagacgaccacttcttggatgacggagatgattcggaacttccatcttggctccggcgcttgtcgctgcgaggtgaagaaacagacgccgtggggttcttaggtgagcctttgaaaaggaacgtcttcgaccgccgaggcgtggtgggcgtccgaggcacctcacattcgacttccttatcctcccctatctcgctgctacctgctgcctccttgtccattctctcgttctcttcgtccgagtgcatgtccgtcgattctgctctcgaatggaaagccccgacggagctcgaccgcctggtaaaccctggacgaaggctgagccgtctcatgatcgaaccacgtcggaagagatcaccccttccaagaaccattcctggcaatggaaggaggtctcctgtgtagatgtctgagatcagtcgctccagccggattcggtctattcggcgagcagtcaatgtcaatgccgagcggtcagtagatgtcttaggccgttcaagctcgccttcagcctgtgaggctgtttcttcggtgtggcgtgggtcatttgttttcttgatgactacatgttggacacggaacttgcgggagattgccatagaatccatcgatgacctccgcgccatagaagacactgtgtattgaacgtggtccaaaggtaacagttggagggttaagaaagaatgttttcttggttcccacgtcctgggttgggccacttctaccaaagccgccgacattttgagaatctcagtattccattgcttttcttccactgccgatgatgcactgagaacaaattcgtagttctcatctttattttcaaacaggagcttccatgaaaatatacatccgtatgagcacagtcctgatgggttagatatcggggataaatctcagcggaaagttactcacctcgtccattttgaagcgtatcaatcttgagagagtctagatagacacaagccactgcttccagtcgacgcaggtcatcaatccccttggcaaagagaaggtagcgttgaaaaagtacacagaccatgaactccccgttagtggtgtccattgtttgatatgtgacatggagcacaccgcacatgaccaacgggccaaggtctttgtatatactctgaagtgcatgctgcccaaaattcagtcatgttcatctcatcaatgaagatcttgtgcctaccgattccgagatatccaccttatcctggagaacgattgtcttgtcgatacgatctttgttgatcgggtttccagctgataaattgacccgtgttactagcaaccgtatactgtccaacacttgctggattccatcatgagaagacggacaatcactgacaggagtagacctgagcagatcttgtaggacaagggggtatttgcaaagacgttggatgggctatattccggttaatggtcgaagcactcatcatatttatctcacgcaccttgattaacaaatcattcaatgtcattgatttgtggtcctcttgtctgcgtcgctcagtagacgcgaccgatttcgaaagtgcctcgattccctgatcatatatcgtccagttggcaattgagcggcgtaggagagcaacatcctgtgtcaatagttcatagttgctgcaaaattggtcatacgctgggaatgaaagtgcctataaaatgcccagtcagtgcatacaatcctatctagtacaccaatgcttaccaatttttcaagttcacgggccacttccagtccctctgttggttcagcagtgagtgccatgaggcgctgattgaccgatgccttgagtgatcgagtcctcaaggatcgttgctgaagtccctttaggctgcccagatcaagggaccctatacgtttagtgattccgcgagacgtaagctcagaggcacctgcctgttgggcctgaggtgctgacatgggagatgctctctgaagttggttcaaaaagcgttcatgtattcccaaaatctcctggatgttgtcatagatctcgcgtctcgtatcgaagatcgtaaggatctatgtgtttacagagcacattagcatcaggctaaggaatgacagtcagctcaatggcttaccccgataagggccttcagaccaagtacataatcagactcagtctcaacaagttcctgtaggatatgacgccgtctggtggcccgtgtttccgcagcctcatcagtattctggcttaagcttggccgagagctgtcaccagaatgacgcacacccgatagtgtactctggtttgttgcgctttgaatcgttgtcctcgatcttatcaagctctggcttccaatgcttgctgtggttgttttgacggttccgaggtgcgatgagtcggatgcactcgactggtgaccttgcgagccatgggaagatgaatctgaccagccctccacatatcgccgttggcatgtgggagattcgtgtttccgtcctcggaagctatctatccatttcttgaatggacgagaagttgacttatcggctagagtcaccccaccgccgctttcgaacttctcttcggactcatcatttagcagggcttgcttctcgatgttcatctcgtcctggtcggccatggtcccaaatagcgatcccgcccaatgaaatacaggactcaggttccgagggcatggagaaagaaaaggcggacctaaccgactacgcaaaacaacggaatggaacttcatggcgagggaagagcaacaaagtgtgcctgcctcgtctacattcccgacgttggaaagtgcatgtatctaaaacagaggaagctgccactatccaggcagtacagagtagagacagcgaatttgaattccatccatgtacgtcatcaggtgaggcagcagtatagctagaattgaaatagtgcattttgattgttttatattaggagtaactgagctttttttttatatcaaacatccaagtgcaatgtcctgaaagtgaagcttacaacttgaagtccacgtcgtatacttcgagtgccaagcatcgccgcttatataaaaaagtgggagctccagggctgcccaggtgccacccccagacccacttgacgttcttctcccactttctttctttgctcaggaaatcatcatgaacgataacattcacgccccaactgttgcctctggaccgacgtccggggtcactccccgcgatctgtccaaactgtcgatgccagatctgatgcaggagaaagaacgcatcgaggcggaattgtcagctcttagtagcgtcctccagtcggtgagatttctggcctagaagttcccatcgcggtttctaacaagcatttcgtgttagcatggagtccgcatgacttcgtctctcacaaccttcgacggtttcccccgtgatgatattgacatcgcgcaaggtacgcccttaccataccccagtcgatcgggacatatagctgaagggagaatgtagtacgcacaacgcgcgtgcgcattattcacctacggaacgaccacaaggaggtgatgcacctcctcgagaaaggtgtccatgcgcatttcgccaacctacaaaatacgcaagacgctggcccaaccacaaatggcactaacgtcccaccggctgtgcaatcgttgacaaataacaccgtgttggggacaccgttcgccaaggtcaatagcgtggtttcgggaagtccagcagaccaagcgggactgaaagctggcgatgcaattcgaagttttgggaatataaattggctgaaccatgagcgccttgctaaggtagctcaagtggtcaaagacaacgaaggggtacgttcggttctcccacgctctgtcaaaatacccatatatctgattcacttcctctacagcgggtggtattggtcaaagtctctcggaagactgatgaaacgaacactgacaccacagtggacttggacctccagctcacccctcggcaaaattggggcggccgtggcctgctaggatgtcacttggttcccttataaggggtacttccatttagaataacaagcatagcccggttttgctttcaccgtgtacatgataatatgtactgcttatgaataacgcgattaatgccatacgtcctttctacctgatttcacattatactagttaggctcttgtaataagactggggaaccgtatacatctgaagataacttggcaggcgaacgacctgaccatgagagtttattccaataacctaacacaagaataagtagagtccattgtgaatataatacttcaattgcaataaacattgtcatacacactaacttcacatatgtttgcgccatattgacactacgtcagagcgcctcaggcaaacatccacgtgactcccagcaacggggcaaaaattccatcgagcgccattaattcattccccttctttcacccctcccttttatcaacaacccgcccccataactacggcgcgaactcttgcaattttcttctcttcaagtttctctccaaactatcttaatcatggctgctgaaacccccactttcaagctcgtcctggtcggtgacggtggtactggaaaggtaagcgcattccagcctcgcgatctgattgttgatgggcaagggagtggcagccatctgctcggcgctcagtgatggtcatttcatgatattgatggatacactgagctgcccttttcgttgctagcctctgcccgcgcgcctgtcaacaatactgattatctgcccaacggccccgcctcaccgcgacttcattactaaaacagtgaattccaacagaccaccttcgtcaagcgccacttgactggtgaattcgagaagaagtacatcgccaccctgggtgtcgaggttcaccctctcaacttcaacaccgtatgctataccccgccacaaaccccgcttcgcatagtgtcatggtgtcatcgtcaactaacccaacctgaatagaactacggtgctatccagttcgatgtctgggataccgctggtcaggagaagttcggtggtctccgtgatggctactacatcaacggccagtgcggtatcatcatgttcgatgttacttcccgtattacctacaagaacgtccctaactggcaccgtgagcgatcctctctctgataatgaacccctccagattattttgactaactgaactttaggtgatctcgtccgtgtctgtgagaacatccccatcgttctcactggtaacaaggtcgacgtgaaggagcgcaaggtcaaggccaagaccatcaccttccaccgcaagaagaacctccagtactacgatatctctgccaagtccaactacaacttcgagaagcccttcctttggctcgctcgcaagcttgttggcaacccccagctggtacgtcattttatgcctggattcgatacgaaccgatcaatactgactgattaccttttaggactttgttgccggaattgcccttgctccccccgaggttaccgtcgacgagaagcagcttgaggcttaccgcaaggagatggaggaggccgccaaccagcccctccccgacgaggacgatgccgacctgtagatcgttgcgctcaacgacaggtccacgaagtttccgaaatgaaaattgggagtcgctatcccttgttctcccaccctatgttctctcgagtcccatctcacaatcgacgtgtgggaggcagggagtatccgactcccggggattgcctttttttagtttgggttttgcactgcaaaagcaaagtctcttctccgaaatcacgatacaatgaaagcggatgggggatagtcgtggtttgaagacatgcatttttttcctttttgatttcccccaatcttagtagcttagattctcacatcaaatcgtccttttttccctttgcgaaatgagcacacagcgtccgaaatggacgtcctctttcgacaagatttaaaacttcttttcttttactttgaaaatctattcaccagatggatctagatctctgaaattctcgtcaagtgaacactaaatctaatctacctgaaaaaggattgtaaggttggccgtgtagacattattgaatagcagtacaacgcttcttccacgagaaaaaaaaaagaataacgccagggtatagcagtcattggcctccaaaaagagagaacgaaaggatgaaagaaacaaagaaaccgcaaatgatttcgccagatacccatcactgggatagggcagaaaatgaaatatcaatcatatcatcggactatttccagtcgatcgagatcatctggcaaagagaacagatgcaatcaagcaaaattacaagtctctcacaccctgtgtaacggataaggagttagcaaagagtccagtcaaagtagaaaacgaggaaaatagggataaacatacgaagagataagcaagttccctcgcatctagtcgggagacattcatggtaccgccctcatcgagagcaccactgataagctcacgcttctggtcctgaagagtaacaatgcggtcctcaacagtattctcgataagcagacggtgaacgaagacctctctaacctgcccgatgcgatgggcacgatcaacggcctggtcttcaatgtacgggttccagaaggggtcgaacatgatgacatgcgaagcggcgacgaggttcagaccggagttgccggccttgagggagacgagcatgatcttgcagtcaggatcattggtgaaagccgtcacagcggcgttgcgctccttcagattcatgctgccgtcgaagcgggtgtggttccagccgcggcgggccagggggacttcgagaagatccaagagggaggtgaactggctgaaaatgatagttttctcctctaagccgcggtcttcattggcttggaggatctccagcgtctttgtgatttttgtgctggggaaccagcccttctcgaggcggcgaatgtatttcttcttctcggccttgttcctcaaagcgtccttgcgcagctgggctagagacttcgccttcgttttcttctttgattccgcatcgccctctccagtagagctatcggagtcagactcttcactgctcgctgttgcttctgggtcttcgtcgtcattgggcccgttggtatcaccgcctccggcggcaaattcgggcactgaggttggatcgtggacctgcttgaatgcattggtgtcggtgagtttcgcagggtccacgggccctcggcagttctggcacttaatcacagctggaccatcgtcttcgaggttgatggctccgtttgcagttgcagagtcggaaatgcggatccagcactccgagcacacatggtgtccacatggaatgtaaatagtcgcatttttgacactgtccatgcagacagggcaggtgccatcctcttcgccgtcattatctttgatacgttgcactacagcagcggtcagaagtttagcgttggcgatcttatccacccccgggatagacggggagggttcgtttcggaaatcctgcatgagaagtggatggcagcatgcctgccgaagacggagaaggagaactagaacatggctgtagttcctgcccaacgtgcctgagtcaaggtaccgggtgatctgcctttgagtggacgtattgagttcctcataaacctggctttctctctcatcaaacacaacatggaccttctcggtgacctttggtgggagttgcaagatgggctctccatcaatcttggaggattttgtgcgtcggagacagacagacttgactagaacgcgtagttgcttcatgacatcttcgcctccccaaccagatttaatgcgtctcacgaagtcctggatagatataaatgtcagtcagccaaagaagcatacatcaattgtgaactatagagagtactaaccgccttaaactttgctgggttgctataaggccgaatccggaggaatcccaaaagggactggaaatcttcgagacgattcatcataggcgtaccagtcagacaccagcggtaggtagcattgagtcgacaacatgctattgccgatttcgcacttgggttcttgatgttctgtgcttcatcgatgatgacgcgatgccacttggcagcaggactgagaggaccggccgcatttttgaggtcttggattatcgagggatcccgcccttcctctgccaacttttccgcctggagcaatgttttgtagtgcgcagtgattgtaccaaacgtagtgataatgatatcataccttttgagctccttccagggcctgcgccgttgatggtagatcaagactgataattggtgcctgcccggcttgacatggcgctggatttcaagtctccattgatccataagtgccttgggcgcgacaatcaaagtcgggcgtcggtcttcatcctcgaatgggcgagcaaccatcagtgcaatcgcttggatggttttaccaagtcccatgtcatctgcaagaattcctcctttgtggttgctctcttctttggccttcatccatctcaggccaatcttctgatgcttcatcaacgtgactcgaagagcacttggtgtctcatcattgtccgctttagttgcctctcgaatatctttgataccgctgagcaagttcttgatatcttcaggaaactccttctcgttgtaggccctatattaattgaggttagaatcagaactacctgcttcaaaagatgcggacgtacactatgtcagcatcgtcgtcgaatatttcgctttggttgcgaaccaggtcaaaggccttgtcaaacttgtcgaatttgtcatacttctcaaatgtacccggcattgtagcgtacggatgctcatgcgaccagggaaggtttctggaggcagctgctgatgtggaatatggcattgagggatttgacaattgggagggataggccagctgcgaaggatacggcaattgggaaggatatgacatttgggagggatatgtcaactcggagggatatggcaattgagaggggtatgtcaactcggagggatatggcatccgcgagggataaagtccctgtgaagtgtacggtgatttggaatattgcgaagggagagatggcaggtggggatatgaactggatgggcgggctggctgcttgccggatcgatctttgaatgaatcggctgtgatttcttgaagatcatcgtcggaattgaatggattgagtttattgaatggggctatcggggcatatgcttgaggtgcacgattggggtttgatgaaagatgttcgagttttaccggttgactgcggtcaggaatattccatgtatgacactcattggaacgggggagttgactatgatcctcgtcggcttggagcgcgcgagccaattccgcgtctcgttccatttgaaactctgtttcaatcaacttcgcctgctcctcacactcttctcgaagttcgtttatttcatctgcatcgtcacctgccgcatcgatccagtgcttgtacaagcgctgattctcggcaaggcgggcttcttgtgcagcatctatctcgtcgagtttagatctgtgagatttaggctgcgagggagcaatcctttttgatgatccctggatcgtgggcgagacctgagatagcggacgctggcgtttacgggaattatctggagaaggctgtatcattgatgaagctggcagcaatatcgattggccagacccggccgcgaaaggtgagggtgcagcagaaggccagtgaggggacgcaaatgaatccccggggattccagtgaaagtgttggacgccttgcgtggagtagccgcaggcgtccggactggcggagtaggggatgtcacttgtggtgttggggcggcttgagaagtaggaacaggatcaccaaggagcgtggcaacctggacttccatatttttgatggtatcacgaagctcatctgcttctgcacaaggaccccgcgtcgcgaggagatcatcgtatatgtatctgtaggtatcgagatcctccaaaaggtctttgatcttgtcctcttgggactgatcgaccgaagaagccatggctcaagagcacctggcgctgaccgcgaaatgttccaagaccaaaatatctgaccaaaatatcccgatcgttgagagggtagagagtgaggatggcgatgggtgtgacggctaggacaggaggcaaaatcgtagatcaatagagctaccacatcaagtgagcgtatagggtgaagagtaaagtgttctgggagagtcagccggtgaaacttgggttctcatcagcaaaccgcaaggcagaaagcgggtagcggcagatggcagatggcacagtgatgaagagaaagaaagcatagaagcaactcatcaaattgcgtctctgtgccatctcatatgggtatttgcagaggatgtagacttacaccgagtactatcgacgattcacgggggagaatctgtggatgacggagcggattttcggacctcaggagcgaagaggtagcgatcgcagaaatgagagagccctcgtttctatagtgcaaaagatccgatgggaaggacatgggagttgatgctctttgcgaccgttcagctggccccgggggtcgagatgttcacctctgcgggggcagttgaagttctcgcccaatatgtcatcctctatcgcagtctacagcgaccatgaggactttgatcctattgacttttattgcctgcagaaaattggctatctggagagacatgttagaagactcccagaagatatttaaaagacgtttagaaggacgacaaaaaagagatgagagagagacaaatgattgaaacatctctgaaatcatcttacaccgactagatattcagatgatccaagtcctatatcggtaagggtagaggtgtataagcggccaactattcaactcccatgtaaatgaccaactcactataaatccagagaaacctcatatcaagaggtttcccagcaattcaagtactctctacagagtaaatgtatgttcaagacgttagaaattacttcatagaaggcggaggcataggcggtaaagcctgaaagcaaatcaagcccaagttcttaatggacgctatcatctactatagttatgagtacctgccaaggtcccacgagggagtcttctacttgagcctccatcaggcactgtagttttattcattgctatatgtcgtacatcagtattgaagtcctacagaaaatgttcttcagtaatatagacatatacttcagagtatgtaggtgattctacctgcgtcgctgtacaaccttgattgacataaacgcgctcttatcagaacgtgatcctgcgcgtcacgcgccaaacaagctaaacacagggctagatgatattgccctactatcccaattaggcactggacactccaggcatctggtactagtttcagccatcccggagtagtttcaagatttcgatcatgactgtgagaggttgatatgactcatatggtgcctgggctggaggaatggtcgattttcatgttataagacaaggagtacaacattcgacgtgaagctcaggctacaactgatgccgatattcagaccggaggaatatctcttacatgtagctgaaacgtaaactagggggatcacttggagatatactgaattgttcaactaccaatcatctacgtgtagtgcccatatttcaatcaattgggttgctgcctcggtgatatatatctgcaaagggtctccgcagaaacgatcgatccatcgatcatggcatcggaacagggactggttcgactatggaagacgaagcacatcccagaagttctcaagagctatctagcaaaaaaagacctcaccgcatgccgtctagtatctcgagagctcgctgtctacatcgcaccaatcctcttcgcagacattgaagtccgtttccgcagcagcactttcaacaggccatcacggatggcagctctagagcgtatcgggggacacatccaggccatgacatttaagatctcacatgatagggagaccttcttacctccaatcctggatccaatcatggggacagaacagacgttcatctacacaccacaacgacgccaacatagtggcagccggcaaatgacagagttattagtcaagcagtacccgcctctgttccatgcatctacaaacatcccatcatttgtccaggcattgacgatgatgagcggcttgcaacatctgtgaatctcctgtgagggtcagctaccaagccatcgctatcgccgaagtgtagtagattatgcattgatctcattgcgaatggcaatccagcaagcactattgaaagatctccacacctgtcattattatcagtccacccaggagcggtcctttacctgtgtccagctctaggatttggtgcttcgcctgcatcctgcaagcgctggtcccagacctgcaagctcacggtccaaatgacgaatttcggccatgagccaggtcaaccgacagaccacctcaagctcctccacgcatacctagcaagcttcccatctctgcgaagactggtctttcattgggaaggcgagaggggcctatcacctctatcacttgcaacaaagccgagcctcaacagcaaagccacaggaaagccaagtcaagcatgtcctcagagatgcgcgtcactcttacggccattgaaattcaagcatcttcagcagatggagctggtcaatgcaacaatggacgcgtcgcaagtggcgtctttcatccaggagcaccggagttccctacgagagttcaacttcgggaacgtggtgcttcgcggcggaaattgggacgacgcgctcgcgccgttgacacgactcaggggcagcgaagggtggaagcaggggcagcgcgacaccgacaccgtagatgtgccgatagtgttgactccagctggagtcagccagaaacaattatataaggcgatttgtgctctgcagcaacaaaagggaccgaggagggtgagaagcttggccaaagcgcgatcccggacacgtgagctgctgttgtgagacgcggatcatatgaagcggctgcttcggtcttcggtgtttagttggcggtgacgtcaagagcaaggggtacgtaatgttctcttccaaggaaggaatggcataggctaagaccaacaaccgtagtagtgtcgcggcgaataccgcatttgtgaaactttcaggtcccaatgcaacctcagcgtggttcgtgtggagtcggnnnnnnnnnnnnnnnnnnnnnnnnnnnnnnnnnnnnnnnnnnnnnnnnnnnnnnnnnnnnnnnnnnnnnnnnnnnnnnnnnnnnnnnnnnnnnnnnnnnnnnnnnnnnnnnnnnnnnnnnnnnnnnnnnnnnnnnnnnnnnnnnnnnnnnnnnnnnnnnnnnnnnnnnnnnnnnnnnnnnnnnnnnnnnnnnnnnnnnnnnnnnnnnnnnnnnnnnnnnnnnnnnnnnnnnnnnnnnnnnnnnnggggggggggggaagtcatggggggcgaactgtcaacacggggaagactgagagagggaccaagactatgaccggtactaatagaaatgcagatcctagtccagtctagacagaatcctggagaaatggcaacaaatagagcaaagtagaaagaagaatcacagacactgagcttcgggggaaagtgtgggggcctcggcacccgtggaagctgaaggcagttcacatgctctggcagattgtcacttatattcactcacccgccttcttgatttaccatcaccttgtactaccgctacatccaccatgtctctcaagatcggtataacccccttattctgactgtaccagaacccagctaatgaaaatagattctcacccctcgtccgccgccttcgacgtgatcaacgagacgctccaggccaacgaagccagccgcaaggatgccattaaccaggccaaggctatcttcgccttcaacctgaagaacactagtggtgaggaggcttcttggtaccttgacctcaagaacaagggcgaggttggacagggtcttgcccctgctggcagcaaggctgatggtgagtctccgttcctgatctgcggttgatcttacacatgctaatttctcttcgtcaatagtgaccctctccctctccgataatgacttcgctcagctcgtttccggcaaggccaacgctcagcgtctgttcatgggcggcaagcttaagatcaagggtaacatcatgaaggccaccaagatggagcctatcctgaagaaggcccaggtcggtgccaagttgtgaagattatatacccgtttgagaaattatataccaagtccctcatctagggcgcatattttcggcctcctattcggatagttcggttattcaactccgagtataacaaatgatcttaatatgtaccggggaccgatcatcgctgttcggatcaatgaattctaactctacaagtctcccacatgcccttgtcgcgaaacccgcccctgatccaaaaccacaaagtaatccgcatccttgacagcttctatgcgatgcgcaatcgtaatgacagtagactgctgcagctcctcccggataatctgctgaatctcaagagaagtctcaagatccacggaagcagtcgcctcatcgagaatgacaattgcacttcgacgaaggacagcccgtgtcagagcaataagttgccgctgaccctggctaaggttcctccctccagcctcaatgtgcgtctcaagattccagccgtgccgactacagagacgctccaggatttcattacacagctcatcggaataatcgcctgtcgggtccagattgagtctgatgctaccggggaagagaacaggatcttgcgcgacgaaggtaactcgggtgcgcaatgcttgtgtgctgacgtcggcaatattgatgccgtcgatgagaatgcgaccagactctggtctgatgacgctcagaagcgacattgccattgtggacttgccgctgccagtacggccgataaccgctgtggtggatcccccggggatgcgaagagagacgtttataagtgaaggatcgagatgtggtgcgtaacgaagagttgcatcttcgaagacaacgtcgctaccgtaagttggccatgcggcagggggaacaatggtcccaggggtttcttcttcaatgtggagtaactcgtcgactcgttccaccgacacaaagtccatttgaagttggccatactgcttgcacaatgcatgtgtggaatcgacaaagttgttggcagcaataagtacgaaagctaccagtcctggtgtggtattggtgtataacgccagagctgttagacaaaatgttgagcaagccgacaagccctcaaagcggtacatgagccagctctggagagaccaatagaaatggtccattccctggaacttgtcaaccacagatatgaccctgttctggaactgtgattctgcgtggaaagctcggacagtggtcagaccgtgtaatagctcgccgaagttggacaacaaaggactcagggacaccatttcgagtcgtcgtaggctctgagatgtggggaggaaacgtaggaataccgagacaaatgcgactgtgagagctagtgaaaacaacaaaaacaccggggtagcggtggcgattaccaggacagaagagatccaagtgatagcctggaaggcaatcacctggaattgctcactaatattgccgtccacgactccaatatcagatgtgagacggttcatcaagcgcccaagagggattgtatcttgagaattggtcagctttgtcctgttgagtcaatctacatagaacttacccaagtatcggaaggtcgcatggctgactcggaccaagacccgtcggaacaaggactgcccagcataatagacgatgaccagcattagaagctgagcgacaaggagtgtgaccgcttggaaagagatgatggcaaaaaatgtccatagccagggtcggacatcctcacgcggagatggtagttggcctatggggttcggaggcgtaaagtgtgtgcccatgctcaagttcgagactggccgggtgctttgcgctgacctctcactccaattcgagagatcccctcgaagagcagttgtccgctcatacgcttctccccaccctttgaggaaccatgattgcccgacagccatcagtcggtagatcgccagaatcaggacgagggtaagccaccaccggtactttccagccttaatataattccagtacactcgggccttgacacccccgtctgcccggtgctcttcctcgatgaatttatcaggcacggcagctgtctcctcctcgagggtgggttccgcttctgtttcgttttcaatatcgacaaattgcagagaagactcggtcacgtcaagcttgagggtatccttgtcgtaaacagtggcatggtttccacaaatattgataatttgatccgcaattcgacgaaccaacgtagttcgatgcgtcactagaacgatacttcgatctttcatcaaaggccccgagaagcatttgcggactatcagctccgcagtattgtgatccaacgcagacaggggatcatccaaaagcaggacccgcgatgcgctatagacagctcttgccagagatactcgcgctttttgtccacctgataaaccaatgccattttcacccacaaacgataaatcgccatgtttgaattgagcaagatctggaagtaaggcgcaagcttctagcgttcgtttgtagcgctggtcatggtagggcgcggagaatagaatgttgtcacgaatactcatgctttgtagccacggtgtctgggcgcaatatccaaccatttcgtttggaatatgcgctgaaccggaaagtctatcgagttctcctagaagagcttgcagaaatgcggtttttccagcaccgaccttgccagtgacaacagttagtcctttggggatggtgacattgatatcaacaaggacgggtgagacctttcctggccacgcaaacgaacaagaatgcattgagagtagagtatcgttcgccggggtttcagaaggcagattctccttgtctggttcggacatgaagtcctcgatacgcccaagggcaatgaaggcattgataaatgatgtgataagactaggaatatcccgaagacgagtctctagcatggtaaataattgtaatgcaggaaagataatatcaatccgcagctcatgcccggccaacaaggtatacgcgtacaacgcaaccactggaaacacgccactggcgaaagcgttgataaagcgaatcaggatactccacagactagtcacaatccgaatattcaactcatgctgtcgggcctccattacttgttgaagccagtgattctgccacccgtaccatcgcagatgacggattgcttccacaaattgcgaagttatttggagtcttgtatccgttgccactcgtctgactcgctcccaacgtagaagagctctagttactagggcattcatgatctgtgcaaccaggacggctaatattcctagaaaacaagacggaccaaagagtgtccagacaaggaaggtagcgatcacaagtcccagtggcttgtcaatcaacgaatcaacctcccagaatctctgtgcaacttcataaacatctccgcgcaagaggttaaagattttgccgagtgatgctgcttctttggcttgtttctgtggcattttttggttgcgagaagtgatacgttgccagaaacccacggttttggtagggggttgatcgttctcttgagctccggcctcaccattgacgccatcttcctcgtcggatggtactggatcgccctcaatcattagtccagaaatgttctttcgagaaagggctttttcgtaaaccatcatgatcatttcaccccttgaccgttcatagcatcgtctcccgtaccacagaagtaacacctgagactgtgcagcgacaagtcgaagagcgaaggacatgaaagcataggtcaaaggtacgcgttttggtcgggacgggtctttcatggcctgcaatagtttctgcaataaaacgggagtagaaaagtctgtgaaaattgttagcgatataagataaaagaagacatctaaattcataccacatatcatctggacaagcgatatggttgagatgattaaaacatcaattccattggctctcaacagccggctgaggacagaaccacgaagtcgacgaaacttttcatgcaggcgggcatgttgaaagtcaaatccaagcaaccaaacgtctcgttcatgaagttgtcttttgcgcccagttgagatcagcggtgccatccaagacactgtgaggaactgccagagcctcagattatcttctggggtgcgaaagttatttgatggctgttgaccaacagcactaatatctatcgatggcaaagactgttcgcggaatggcattaggaggattgttgcacaggctgccgccgctgcccctgcggcaatgtagcgagcaaccatcttgaatttcgggcatacatctgggtgagtagccaaagaaagttcaattgtaaatgctagaaaataatacgaaagcatcaagatggaacatgatctgggccgcttgactgcgaccagaatagatgctgtggcctaaagagggatatcagtaattgatactcccagagacgggaagaaccgacccatgagagaacaagcgcaaaggccgaggcgtcaattgtcggaggaacaaattgaactgtctcggctagaagcccagtagccgaaaatagaaggagagagatagtccatcgcaatgattgcttgggctgatctagcgggagatcttgagtatcatgttgctcagacacaaaaggaacagtccacttggggcgccatcgctggcaggagtattcaagtatatggcttaatgcaataagcaacactattatggccgggatgcatgctaggtatggcaatgcacaaggtgataaccacgcattgtgcgagtcctggattggtcagacggtgcgagcgggaacaggggcccgcgagtacatacccagaattggtcacactgggatctggatgcaccttccagcggaatttgattcatgcttggtcccaagtgcagtggcaactcttcgcggtagccttggggacctcacgaagcaacgtggggccggatcaatattcatccgctggcccgtgtcatctatacaggcgggtcagagtttggaatttagttctcgcctagaacattatatagagagtttataaaccgtgtacttgtttcaatggtgttgcaattagagctgttgccttgcagggaaatatgccgagtctatcgggcggtcttacggcttcaatgggcggactggcggagtcatccgccgcggggcgggccccccccccacagcgatctggatgcaccttccagcggaatttgattcatgcttggtcccaagtgcagtggcaactcttcgcggtagccttggggacctcacgaagcaacgtggggccggatcaatattcatccgctggcccgtgtcatctatacaggcgggtcagagtttggaatttagttctcgcctagaacattatatagagagtttataaaccgtgtacttgtttcaatggtgttgcaattagagctgttgccttgcagggaaatatgccgagtctatcgggcggtcttacggcttcaatgggcggactggcggagtcatccgccgcggggcgggccgcccattcacagtccggatgaacctcgtcacaggcaaactacatttttaataaagcctactaaggctactaagttagaacagtaatggctggagtatctccccaatacctggcgcatggtactgatttatgcttgaagcaaggcaggctgcttatcctgacaacagaagaatgcgatattaaagcggctacatagcccgcctgagaactcgtgttttactatgtaataacacaatgatcccatgaatctcctgcatcaaagagccttccacggcaaatcgctcgatggtttctatcgtgttcttctgcaaagtatcaatatccggtaccaagtgggccaaagctggacaaacagagcctagggtcaggagaagaatagaagaaaacatccttaaagaatcaaacattagttgagtccaagtataaagcatctcgtagacatacgtatgaataatgatttctgcgcaaaatgacgggcccaccagtctccgcgttgaggcatccagatacgttcgacaattggctatgctggactcgcactgtttgagtaccatagggggaacatcattctcgggtgatgagtcaattgcacaaagaagaaatggtctagttatgatatccttggcggagtggaagcggtggagcatattgagttgaaggccagtacatcgtgacggatcgttcatatctggtttaattgttcgcggtaataagtcaaaccaattgtcgagctgccgggcaagctcttgggagacattcaggatcgcagagagcgattggaagtcataagagggactgtcgcttgagactggctgtagaccgaggctgcgccttgtccagtcacttccgtacatagtgtggtgtactctatttagtaggcgacgaatggatagttcggcgaggaagacgtgtgtttctttggcgtcgttatttgcaaaggttggaaaaggtgtcagatcaattacatgttcgataccgcttcgtggtaaatggtgttcagctatcagatcactggtatcaatatcagcatcaacgtgatttacccggatgggaccaagaaaccaaccactcggtgtcgaacgctgcccacgatagcagaataatgctggatttgaggtcatgattatctgccgaagcttggcttctatcccaaacagatgcttgatcaatagctgaaatcaaacggaaggacaaagagcttaacgaaccggctatttaaatactggatactggtggaagccatgtggaccagtttccatgattgcagagggcgtaaaagaaacccaaaatatttcgaaatgagtatcaaactctggggaagagtgattgtgggacaaaatgaaagtaaatattcattcatcaatatctgcaacgcaggtgaaatgaagtctgccccaggcacccagtatggagacttggactttatcgggtcaacctgctcgagagctgcagagcctaatgcaagaactgcaaggcatagtgcagagtcacagtcaacgctcagaccggccctaatatggtgatcgtaaagccccaagaattggtctttgtcaaggattggcatctcaacatggacgtgtttgaaatacgcctccactagtggataagtgctcgcttcattgaggattggcaactgactcgctgtaattgtacctggaacaaaagatagctggtgtggcatatgcctttttgattctgcgcgtataaacaagtctgggggaaactctccgaagagcgcctttactctagtcatatgcagcatatattcggttgttgttgtatgaccgatgggaatactcatgggtggtatatcatgttcaggtggtatgaaagtagacgaattcgtacttataagctgggagatatccgccgggtttggtcttgacggggacgaaatcaacatggtagaaggatgagaaaagtccgctctttcattctcagatgacggcgggagtgtgaaatcaccactccttgtttcaccagtctggggtgtttgagggagtctcggatgactccataagaagttctcaattgcatcgagacggcgaaagaactccgaagaggaagtttcccctcgaggcctgtcggggttcagtaacgatggcgaaacttgaaaaaaaaacaaacgggtgtctcacctcgcagtatcagcttcattataaacacaatcaatacctgaatcctcacagaggctacaggagggtatcgcaccattgcagcggcgtttcctgcttgtctgtcagcatgaggaaacttggtcataggagttaggggaacctaccgcctgcgacaatagttgcatgccaaagaagcacgcttacgaccagtttccatgtggtaaattatatgggcttcaaggcttaaagccacctagatgaaccgtgttggcgttgatgtcgatacaagacgggaaagtccgccgggaacccgcttccacccgtgaacagattttgttccgccttagtcatcgacacttccgcccgctcgcccagccctggggaaagcttacgatagaggaaagataactttaatcttatttaatacttaacagctcatcaacccttccaatattgtttttcgctctcttctcttttatttactgggaaaaatctctcttcgacctggacatctccatctccatattcctttgcagtacggagaacggaggacacaacgccccttgccaagaacaccgacccacaccaaggccgtttaccagtcttctttggcttggttccttaggtatatactattgtacaattaggctgactcctattcaagatctttgttttcaaggtcattactcgttaaattcaaattatctgaagccgtagacatggccacgtttaaaaatgagattcaaagttgtttcgggccgaccttcgggaaactctcggctccacctgagttccccggctttcagagattttttagggcttgatcgagatcgggaatacccgattcttttcagtctttgaaacatattgagagctattaaagttagaggtctaaagtctcgactaagtcgcgtggaaggaacaccatgtcggacgaaaagtatgttgcggacagcaagatcgagagaccactcgaaaaagacgtggagaaaaaattggacgcgacgcaattggagccctttggaaatgaggacacagcggaggtcaagtatcggactatgaaatggtggtgagttgttaattcctgcataaagattgtgaattcgaccatggacatggctaatcaagcttgaaaaggcactgtggaatgcgtgagtagctaaatttgagatcaaaagcttggctcctaacatctattgcagtcatgatcgcagagaatgtttctgtcggaattctgtctttgccatccgcagtggctacccttggaatggttccgtatgtattctcttcgacagcttcgagatcccataactaacaatgtcaaacagcgctgctattatgattttgttcgtctctgctctttcatggtatactggctacgtcattggccaattcaaacttcgccatcctgcagttcacagcatgggagatgccggcgagatcttgatgggtcctttcggccgtgagttgctaggacttggccagctgctgctgttgatcttcctcatggcgagcaacattttgatgttcaacattctgatgaatgtattgaccgatcacggtacctgcacgttggtgtttggtgtcgttggactggtcatctgctttttgggtgccttgcctcgtaccatggacaaggtctactggatgtccgtcatttgtgagtgcagtcatgacacttttcaactcagatgagaactcaactaatgtgtatgaagcattcttgagtgtcttcgttgcgacagtgttgaccatgatcaccgtgggagtcgagagcaaaggacatgtcaagaacgaagcgacaacggatgtcagcttccgcgaaggctttttggcggtgacaaacatcatcttcgcttaccgtaagttaaacagtgaatcgccaaatgatgacggtgaccagcacttgaaataaaccgagctaatccagagaccgatcttatagtcgcccacgttgcgtactttggcttcatgtctgaaacagaagacccacgtacattcaacaagtcactcgccatgcttcaaatcatcgacaccaccctgtaccttgttagtgcactgctcatctatcattacgtgggaccggagacagccaccagcgtcggcgtgcaatcgcctgccattctctctctaagcccgttgatgggcaagattgcctggggtctttcaattccaacggtgagtttattcttttggttcgtcttctgtatcccacttactgattcaatacagacaattctttccggagttgtcttgggtcacgtcgcgtgcaaatacatctatgtgcgtatgttccgtgggtcagacaagatgcacggccgaaccttcctatcgattgggtcctgggtcggtatctgtctcgcagtctgggttgttgcctgggtcgtggcagaatctattcccgtgttcaatgatctgctgagtctgatagtaagtttatcgaatctcactcgaccgggaacgtttgctgatgtggagattacagagtgcggtctttggaagttggtttagctgtaagattgacccacctttccatcattgaatttcaagatctgaacaagtgctcacgtatcattagtcggactcccggcgatcttttggttctatatgaataagggccgttacttccagaactggaagaagactgttttgacgattaccaatattttggtcttggctattgcctttgctattgtaggtatgcccctacttatatccagttatggtggctaatcctttccagtgcgggttgggactatgggtgtcaggagtcgccattcacgaagactccagttccagaagttggtcttgtgccaataatgcgtgattgaagagttgaagtttgacgtattcgaatactaacaaagccagactatgccgagtctgcacatggcatgtcggttaatctgcaactggttggccacggactcgaagaaaaaccgttggcgatggcggattgtcatctgaaatccatcgccccgtgactaggacgaaccaacacgaattcagacattatgactccaatatcaacagacgtgatttgagatggaatatgcagcatcacggccttggcggtagaaagcaattgtgcgtagagtggccgttgcaccaggacgagcgcgcgactggatgaggcaagctctttctaaccaaaatctaacgaggccggagactcgcacaatcgtagtcgaattcatggtcaaacctgtttctgtcaatttttggcagccgatcgaacaggctcaggggaggaaggggatgttgtaattaagaggaattatttccgagcggcctccttatctcatgagaaagaacctcaaatataccaatgtacttggcaatctcaataccctcagacagcgtactttagtggatgtcggcaaaggaaaatccccgactcccccgctttggcggaagtgtcccgcctcccatccgcctttccccacctgacattatcgtatcggtgtgttacttccccgccagcgtcagaattattattctcacagagctcgctacttcaaacttgctgctggtagtgatcgtcaagggcggtgtattcacgctccacatactttccactccttcttacatcctctgcgcccagtgtgaactgtctgtcttggaatttagccttacagaatcaatatgcctaccaacacctcagcaggagcgagtgaggaccagcgtgcctctctgatttcccgagtccttcctagaatgactatgtcggagggatcaagtccgctcactcgccccctcgctccagtgccctttacagatggtcgctcacgagcagaagcacgatttcaagttcagggcaaagccatagtcaccggcggagcaggaggactaggcttagtctctgcacaggctctcctggaacatggactctcctcactatgtatcatggacctccccagtaccttggagacgtcatcagaacaaattcaatcactagcatcaaagttcccctctgccaatataaccaaaattcccctggacgtgacatcaatggagtcaatcgaagccgcatttgaacaagcaaacaagacaatggaaggtatcgacatcctctgctgcttcgctgggatccccggctgccaaccatccctctcagtaacacccgaccaattcaacagagttatagacgtcaacctaactggatcctttttctgcgcccaggcagcagcaaagcgcatggaatcctcaggcaaaggcgggtgtgttttattcactgcgtcgatatctgcccatcttaccaatttcccgcagccgcaggcggcttacaatgcgagcaaggctggggtcgcgcatatgactcgcagtctggctgctgagtgggctgttcatgggatcagagtaaatagtattagtcccgggtatatggatactattctcaatgctggggacagtttggcggatgttaggaagatttgggattctcgttgtccgatgggccggatgggagatcctgaagagattactggggctgtagttcttctgtgtagttatcgtgcaggacggtacatcactggtgctgatattgctgttgatggggggactttggctctgtgacaatatggtagatgctagctacttttcccctcctgtcattggttccgcttgtcttatctcagtctgcatcgcgggtgtccttctcaagctttgtctgcttacttctaattctcaaatcagtttcaaaaaagtagtgtttcttcaagaattgttcattgtatctttttaaatacaggaaagaccgcacagcagctttttccactcctctttaccggcagatgtaacctccatcaatgcgcagatcggcaccagtagtgtaagtactagcatcactggcaaagtacacatacgccgccttcaactccttaggatcactctggcgacccataggaatcatcttattccaaccctcctgaatatcagcaggcacaaagtctcccaaaccggtattaatgtatccaggcgagatactgttgacacgagcaaaatccctccactcattcgccagcgagcgagccatgtgaatacacccagccttagcgacattgtacgaagtctgctcctgagggtaattgacaatgtggccggacatcgaagcggtgatcacaaagcttcccttgccgcgctccttgaaatgggggccaacagccttcgcacagtaaaagaccgagttgagatcggcctggatgacatcgtcccagtcctgaaccgagccctcgagaacacctttatcggcagtacggcccgcgttcgcgataaaggagtcgatcctgccaaagtcggtgatcacgtttttgaccagctcttgcacttcgtcccatttgcctgtgtcgcatttgtaggccttggctttgactccgaactcctcttgcagggctttggcgtttgcttcggcgccctcggggcgcgataagtatgtgatggcgatgttgccgcccatttcggcacagccccgggcggcttcgtagccgattcctcgggggccggaggcgccggtcacgaccacgaccttgtctttaagactgaagaggtctttgagagagctggcttgagggacttcgataggcatggtgggcgagaaaagggaggagttgaataggtgtatagaaggaaagatgaaattattttgaggattgttggtttgtgtggaggattaaggggtcatagaagggatctatggggtctttataccttttcatcgttgatggggactcgggtccaaccttcccaccgtacaactgtgcaacttgttttgctctcacttgagatgttgtccttctccacccggcgggacactcggcggcacaatcccgccagcatttctgtgggcactttggaggggcggatctctcaaattatttctcattttggtagataagataaatttagaaaatagcaaacgcattaggcgggctagcgacacccccgatgacctagaccgagtctgaatcagcacaatccccgcacagtcaataagcgggaaaccaaccttcaaaggcatactggacaagaaaaagctatagcgtccactagccttgcaatgttccgataacttctccaaatcaaacatctccccaataggagttccccagcccgccagcacccactcatgtaaattgaaattcgggtccgcatgggcacctctaataggcgcacgctcaaaactcggcgcatcaccagcgacagcagagaattgatgcgcccataaccatcgtaccatacactctgtcgcctcgacaccgctaaaatcgggcgatgatcggagggctaggtccttgcgctgctggtcgtccagcttgttgtatgcagccgtgaagccactgcggataaagagaatgtcacccttttgaaagttgaggttgtgatctttgactactcgtttcaggttttcgacggtaatggtctcggatttgagggcggaggtggggattgagtttgtggtggcccattctgcgtagtcgaggaggacgccgcgacctgttattccaccgtgttcacatatggctgaggggttgagattagtacggggttaatcatgtaccttgaggtgatgcatacagtgaattccaatgatgtccgagctttctatctcttccgtggtatgtccgttataaaactgcctggatttctggtttgctagattcgccaaccaataagcaatgatctcagacgccatagacgctcaataacgcaccgtaatgtctaaatccatcccattgggtagacccctggctattgaatgccaaggtgtcatcatgaatacaatttggactccgaagaataagctcgtgcttaaatggattgcgattgaagcttggatacgaaggcatgctcaacggccagtcaagagagattcgcacgccagttttgatttccttggcggcttcgacaacccgctcgggggtgagcaggttcaatgtcccaagttggtcatcttgtccaaatcgaccccaggcattccctcgtgggcctgttgggtctagtggaagggagtcaaacgagatcattgcgtcttcagttgctttcgtcatgatgaacggccccgtgagaggaaaaagaggctgaaggtgtatatatgctgttgttatacgaacgggtatagctttagctcttaaatggaagaggcgaacattaaatacggcgtataatagctcaatgtcaagacaaaattgcgtactcggatatgaatccgcgtgtgggggaagcttatagacctcgggatgagcggggtctacggggtcaccccggaatggacagctcgggagctcggggaaataaaccccgcgagtgcaaatcatacaataccgtttttttaacaactagttacaatcaatactgcaaattcactcggaagtattaagaaacttgaggcttcgttgatttctcgttcccgtgacaacaattgctaaatcagcacatgagagccaatctagtactggatactacatctttcgaatcgacgatactatattcgttggggtcatcaccttcccttcccgtgatgaagacaaacaaacgtatatgttgggtgtttgcatcactatgctgataaataagatcagcgctgtcaccctcccctgcggaatacccatctaccaactacccgatgatgatgagcgacgatgaagacgtcatttgaaatgccgttctatgcgactgaattgccctgcccgctacctactggtactgaaatcgagaatgccccggacttatccatgcgacatggagggcgaagaatagtcggagtaggccagcattttgttgtgaaatttggactaggtgtcgatcttattgaaggagaaagtatgttatttgttcggtataatacaaacatccctatcccgcgagtcttcgccctatattcggatctagagataggcaaaaacttcattgttatggagtgtgttctcggtcaaatacttctttcagtatggccgcaacttataacatcggaaaaataggaaatactgaaagacctgtagggatactttgacaacttgtgccagcttctatccctagaatactttggtagtcttaaccaaagacagcttctagatgatatattttggacacaggagccagatctattagtgaatggtccttttaactctgaaggcgatctcaacgaagcaatactacgaaagtatacctacaacggaggcccgtactatagggcagaatatcttcagaaatgctttccttttgtttttaagggcaataaggcgacatttacccatagtgatttataaagaaagaacattatactatacaagaaacctcatcgagaccaagaaggggggcgcgttgtgataattaattaggaaaatccggatggtatccagggtattgggaatattgcctagctgtctgtgctttacgatgggatgacgactggtccctttggatcgacggtatcctatcaccgtgtgtctccgaggctgcatactttcagtcactacgcctagaattatggtcatagggatattcaaagtcatttcgtccaactagagaggatgtgatcgaaattttgactagattcttacattaggcataataatctaggagtggttaaactatagaatttgagtattgtgctagtatcaaaatggtaataagttcttttgtcaagagagagaaaatatagatgctggaaaagaggggctggtgaaccccttcatgcaggatatataaggggcgcatacgatcccactgctaccttgtcaccctatcgcacaaggagccgcagaaaggtatatatgttgcgattgcctttcttggattaccctgagtctcgttatatccgaccttctcctattctcaccccgtttgcatcctctatctccaaccccaatcgcgcacagcccttctcggggcgtgcaatagaccaggaaacggtacttggtgagaccatttggaaatcatgtaatacgcattgcataaatatggacttaggggttaatcctcatgcgtatacaagtggtcgatggcttcggaacgataagcatcaacgccagatacgccatcttgatattaattttgacgaactctgccgtatcatggaacatgcggcaggagttcagttacaacagaagtggccctatatgccaggcgactagaaggttcgatttgtagatgccatctacagaaagcttaaagagatggccgacattgactttccagcctatggaagcttatatctttccaccccttcattgggctctttctctgggctactactaaatggcggctttcgcctcggaccccactgtggaacaagatattgggattgtggcgagcgcagatacgaccagcatacacttcccaatcaaggcccttgtgagtctctcctagcccattcttcagaagatgatggctaaaatttgagggtaagggttgacattgactgcatactctgatggcctagtggatgcaggtctttcaagggttccaccgaatgactcctagatctcaaatcgaccattctatcacggctcagttcagtcacatttagaccctctcgaacgtggtcgtacagtgctccattcgatgtctgcagatacccaactacatgatgcagctgcgccaatcctctttcaccccgacctacataagaggaacatatttgtttcggatgatgatccctcgattataactggcattattgattggcagtcatccagcatagagccagccttctggtatgcggatgagattccagacttcgcaagttgttcgccttcctccgaattgccttctgggaatctaaacaacagcgagctatgcagagacaccttcgaagtctgtactcaattcctcaccccaaagctcgtcctccctaggatgatggatgaaggcatgttccgaccgcttaggtactgctacagaacgtggaaagattgcgctgttgctttcaggcaggagctcattgaaacttctagggactgggaggcgctaggactcgttggctcgtgtccatttgtctcaccgagaccggaagaactggctgttcatcgaaaagaatacagatgctttgaggcggcccagaacctaaaacgtgatttgtcaaacttgcctgattgtgcatctgatggatgggttcctccagagatttgggaagaggcaaaattacaaaacaaggcaatgttcgatgggatgttgcaagctgttctgacaaatgaagatcctaatgaggatgaaccaattagggatgaaagggacctgagagatatctggccctttgatttgccggacgagtagttggtctcatctctcattaagttccataagcttagggtactctttgaagacatgcattatgcgccccctacggagattcaagctaaagaatttcttgaaatcagagctgtgtatcattaaagctcaaacgccttgagagtcaacgatcttggcaactagtccaatttacaccactgaaactgcatatgtactggatgatcttcggcattcacgacctttccccttccataactaaataccctagaaggtgaagtacgcaatagtagcagcgaacgtagccagattgtcgccaaccgtcgccaacgcagtaccatccttcacaatcatatagcttgtcccaacagtgttcaacccatataccaccagtccacttgtactgccctcaacgctgaagatcatactttggcaatcctctggaagggggaaggtggagcaagtggtgctgtagttgttgaaaaagctgtatagcccagccccgtagataatcacatccttggtattgagaatccgaagaccaagagagtcgcagtttccgccgagacagctgctatagtcagggtcattgagagccgagttggtagggtacgggccgttggctgcattgggatttggttgatagtatctgcatgcaattggttaggacaggagatgcaagggcagcagcacgtgttggatcacttacggagtttctgtttgtatgaaccctgccacaatcgaactcgcgcctgagaactgatactgatacagcgagtgatgctcggacgccgttccgtatcttgcgccgatgttagttatgagaaagcattgtgaggattatctgtcacttacaaccagacattatttccttctaccaagagaccgcgaccggtatagaccgagatttgagtattagtagcgctctcaaggtcatggtcggcggtccatagccagacattctccaagtaaacaccactggcgactttggtaatgtgcatggacatgtaaccaacctcacagcctgccgagacagctgcagtcgtcgggcactgagcaacctgctgctgagatccttggaagcccccgattcgagtgtgaacatcccacatcccagcgcctgatgtcgctgccaagttccactcaatgagtacagcgcccggcgtggagcccgcggtgctcactatcatatcagaccattcaacgaacccagattctccagatttgccaatttgaaccaccggaacgggattggtaatgctcgaccatacactgccagttgccatgatgacaggatatgcctctccgacaatccgagagcccggtgggacgtaaatagtgccggtgactttgtacgttccttgatcaaagaacacaatcttacctgcagatgcggcagatgtcagcgcagactgaatggctgtcgtgtcatcggttgaaccatctcccctggcgcctgcacttctaatgctgacaaacgaagcaactggtgattgctcatactgaggctttgacttggtaaaatatctgttcgatccaccagcaagcaaagcgctaggacgtgtcggtgcagtgaaagagccctggaagttggtcggtccgtttggagtatatttgtggccttgtccccaagcagcaatggtcgtagaggcccccgagccagcaagaacagtaccactgacgcctttgactgcaacggggacgttgttcagaattatgttctccagaatgagacttccagttgatagtgtggaagtctgccaagcggtatcgacaaaggtagggcagttttggatggtgctgtcaaggatattgaccgagccaacgagttgggccccagcaccaccattgctgatcgaaatagcagttgtgcagttagtcaaagacagaccttgataagtccacccccagttccagatctgagaaattgcggtcactgaatttgaaatggccaggttccgcattgtgaattgctggttgccaatattggcaccatagaggccaccagtaattaccacatcggtcaaccagccaccagagcctggtattggattagtatagacctaaaaaaaataaagtagcaacataccattctcaatgaaaataccctggtgctgtgttccagaagcagaactcatagcaatgacaacgttctcgatgctggaagcttggccagtcggccaatgaataccagtcgcagcagtaccggcagggattgaggtcaagtccaatttcaaattgcgaacctgtctgaagaacacattcgtcgacgtccagccctggtttccatcgctctggtattgatcaccgtcaatcagccccagtccgacaaaacctgcggttgcttttataacaggcattgcattcgggttgccaatcagctgggtgaaatagtaatcaataatcgacgatgagatcaggtacgttcccgatgggaagtagactatcgcaggagtcgtggtcgaggattgtctgcttgccgggccaaaccggccaccggcgcttatggccgcattgatcgcggccgtatcgtcggtcacaccatcacctatgctcactttagtacgtctcaggtagtagcgatccttcaatgcacacctatagctccgtagtctttcacgtttcggaagacttggtagccagaagggttcgagttgaaggctgcgactccttggtgggcgatgtctgctagccagtacgcagcgtctgctgctgccacggctgcaacaggagagttgaccacggcgaccttggtctcgaagcttacagcagccgaggcagtctttgttgaagcaccgaaggaagtatactgctcaaaagggagcatggcagagctgactatagcatccacagcggggatctctagtagctgtgcattggcacaagccaccaaagagaaatacttgatcacaaaagaataatacatcttgaccctgaatcattaaagaggtaagttggcgaggcaggtgctttcgattcacgggctatggaagcatgggcaacagaagccggggacaacgtggtttatgtatgtatagcgacctggacgatgctgacagtagacacaatcggataatgcaggcatgcgcatgacagaaaaggggtagagtcaatgaccctgtatcttcagccgaaagaaaagcaaattaaggaatcccaccccgaaataccactcaagacggggaaatatatagcgagtgactgcagaccaaggatatccattggctatttatttccgaggaggtcaattttcccgtcatgccctgttctctgtttcatgtcctggaggtgtcctagtggaaatgagaatgtgaataaatggcgcagatcttttccccacaagagatgaagtaccctgcctctacctgcatgtcagccaatagccaatcgatgtctacacagcatagagcccgagctaaactgtgagtttggcgtgggtgtttcctgataggaatggaatgtgactagttgagaattccacccttcgcagtatgtgatatgtgatatgtgacttatgggtgtgtgtgaccggttggtcagagagtctaatcattcagggatttatgctcataacctttcttgggattcaaagtgtcctaactttgactaacttaaatgaaattaaggtcagcagacccatggaacgccatgctttaagtgcggggagacgagaccgaaggctcaggtacttccgtcttataggtcacactcaccttcgtttcccttgactcgaacattgtgatactcaagtggcagacttagctaggtcgggttttccggtcacccgcaaggcgtccagcccactcagtgattcttagcctcttgtgttctcagagtgtacacatgcatcacgcagagtccctttgtatacttgctcggcggtgcggaacatcaggaggtacttgaacccactagctagaattgttatatgcatagatttagactctgcttgatataaaagaatccatcatgctcttttcgagctccagtgtgccttgtaatattggtggaacggatctttcttccgctggtcaacgtcggcgacatcatgaagtgagcgtggcttcgatttgagtataaagatatccccctgtgctgtcaattcatttgctagaaaatgggccgatctcattcgagaaaatcatgacaatcgtattacatcccctttgtccaatgcaggcagacaatagtttgtaaagtcgaaccttgctgccaagaaataccacgtgactcgttcttgtccgccttggatgcttcctgcaaaaaaaaaaatattatagtcgtgcctcctccattattgtgttgttggacatctcaagattcgaagacaaatatcatcactgacagcaataaaccatcgacctgtcttcgaccttactttcgccaactcgagagctccttcgtcctgctgacagcttcctgcgcgacagatcgcgaacgtgtcacggaaccgcgaataccaccggacaaccacatcgaagacgctagagacaaatgggtttcgctctctccgcgattgacaatatctaagtggaggataacaatcatcaaagctgttactctttcgagtcggtgtggagttggaaagagcctcgccgtacacggaaagctccctacttcgattgccgccagtgagggaactcatcaggcgccataccgaggtccactcttgcatcaagcttgattcacgtctttaaccctggtcacctagattccgaaggttacgatacgaggcggttcgagcttacaatcatacaaccaacagtggtcttcatacactcaatatgttgaaacgtggagctcaaggccctcaggggtccaaggaagacgagggtgctttcggaatggccagcaccccggatgacaagccccaccgagccacagcggcccagttagccagtagaaagtaagtaataactcaggtagcgtttggatgaccacaaactgaccgaagatctctttgcaactttcaggatcaagaatgttcgctcacgccgggctcctactcccacaaccggtggaggcgcatccgatgcggcttcgttcaaccctttcgcatccgcggccccggcaccagcgcctacccagactgggttcacattcggccagactcagagccagagcttccctgggacaaactcgggccccggccagggtggaatcttctcatcaggcactaacggccagaccggtggtcaggcgtctttcaacttcggctcgggcccaacctcatttggatctgcaccgtcgagcaatcctttttctgttgacacatcatttggcggaactacccagtcaagtaccaatggattcagttttgggggattcaacgccggaaaccaggccactccgtcgttcggtgggttcggagcgcagcagaacacaagcactccagcaaagcccgtcctatttgggcagtctacaacacatatgacttcgcctgccgatgagaacatgcaaacttcgcctgataacaagcccaagggggcttccatcttttcacataagccagctgcacctgagaaacctgccgacaaacctgcggagacccagcctttcaaaccgcttttcggatcaacacccgccgcttcgaagcctttcggtacagagaaaccgcagcaaacattcaacaatccatttgcgaaccttccagggcagaatgcgtccagcaatttatttgcaccaaagacagctacatctgagaaacctgccgagaagcctgcggagacccagcctttcaagccgcttttcggatcaacgcccgccgcttcgaagcctttcggtgcagagaaaccgcagcaaacattcaacaatccatttgcgaacattccagggcaggctccaaccagcagtactaacctgtttgccccgaaaataacggcagctgagcaaactcctgccaaacctgctgaggcggcaatgccctttggtactcttttcgggtccacctccagctcccaaccctcggggcctgctagcaatctatttgcgcccaagccagcggcagaagaaccaaaggcgagcaatccatttgcgagcattccagtgccgagttcatcaggcaatttgtcctcaccgaaggttactgagaaaactaccgaagcacaaccgttcaagcctctgttcggtacacctacgacatcgaaagctgtggagactggaacgcctgcaccagcatttggcaatttgttctccccaaagccggtcgctgaaaacgcggctgcaaagcctgcagcagatcagccgttcaagtccatgtttggtacacctgcggtgtcgaaagcctcggaagccgggaaagaacagactgcttcacccgcatttggtaatatgttctcaccaaagccggttgttgatagtacggctggaaatctatccgagggcaagccgttcaattccatgtttggaacgcctacaaaggctgaaaaagaacaatcagcggcaagcagcgtttttacaccgaaggtgacaagtgaagcgcagactcctatacctgcgaagacctcacaattcggctcaattttcggggcgtctcctgcgtcgaagcttggaaaagaaaagacagcccaggcaacacctagcaacccattcgcgaaccttccagggcagaacgcattcagcaatccattctcgccaaagccggcagagcaggctgcaaaggcccaagcaccgagtacatctctctttggtgcaagtacggcaattgacaacaataagcagaataaggacattgagggtaataaagacaataaggtcgcagctctgaatagcccattgaccaactcattcaccccggggcctaaggtgtcgaacggaccccaaacggaaggtgcgacgactgccacccctcgtgtgtcgttcgcgcacttttcacatgacaacaaaaattcgtcgtctttacctgttccttcttcttccacctcttctctgccctcctccacaacttctactgttcccaacacgttcactgcttcagaccctgacagtcttttcccaccaactgatcatcctgtatctttggactatcctgagtcaactgaagacttcgacagtatgccactcaaacgtcttttcccagaaaagaatcgggacgaactccgcacgcgagcttctttgctcaggaatatcggtgtcttgaccgagtcgttcaagcgtgagatcgtcaaatgtgaccccacaaaagagaatatcgacgatatcctcattctttacgctgaacttcgccgtgagctaggcgtccccattggatcaatcaaacccggggaaccggccaaacgtgccaccattcaccaacgcgccacatggaacgaaggtgccgccgccaaagatgctgccgtcaaagatgcgccaaatggatacgcacctcctcggaacccgacccctcccacctttgtacctcctgctcttgatggcacgccctcatcttcttccaccaagccttctggtgggtctactacttcctccaagttcgcccaatcgttctccgctccaacccctgctccagcaaatacttctgtttccacctccaatgctggtccttcgtcctcagccgcggctcctgtctcggttgctcctgtcactttggctgagccctctcctccgactaccgcccccaatgctactcctgtagccactcctaccgtcgagactcccaagcttggtgatgcagccacttcgactgccacccctgctttccaaattcccaagtttggcgatgcagccacttcgaacgccactcctgctttccaaattcccaagtttggcgatgcagccacttcgaacgccactcttgctttcaaaattcccaagttcggtagtggagctactggcactgattttgcggcgcagttcaaatcagtgtcggacaagaccctagccgaagcgaaggccaagagaaaggccgaagagtttgactccgatgaggaggatgaagctgaatgggagcgtaaagatgaggaacgtcaacgcgagaagcgcgctcaactcgaagctgcagctaataagcgttccgtttatgtccccggcgtgggtttcaagttcgctgatgataacactgctccacaggacgttgaggagcctgctacatctgccaccccatcaacccctccctctctgttccctccttttactgctccttcaaccgcttctactaccaatggtaccccctcttcctcacaataccagccccggttccctagatcatctcctcaatcctccgaattctcaactctcgtcgggacagccactcgttcgcctgcggatgctgcactctttgggaccaagcctggacctccgcctccttccttgagtgcaggccctccaagctcctccgtcggctcttcgatattcagcggatcggtcagaaagccggttccagcctcgcagaacattttcggcaagttgaagccgacctcgccgaaacgcaaggcgtctgcggatgaaagcgacaacgacgatgattcccccccaaagaagactaagtcttcccacaacattttcggcggaccccagccgacctcgcagaacattttcggtgggctgaagccgacctccccaaaacgcaaggcatctgtagatgaaagtgacaaccaggataattctctcgccaaaaagacaaagccgtcgcctccccctccttctgcgggcgccagtatgtttggacgggcgtccactgccccatcgccggccccttcaaccaatgtctcttcacagcccgcgatggccactccctcggccacttcctcggctcctcccactcaatcgatttccaccgctactgaagatgaggacggtgaacctggtgaaatcttcgatctgacaaagggcaacagcggcgaggaggaggaaaccgtcatgttcgaagagaccacccgtattttcaaacttacgggcacctggcagcccaaaggaaccggtccccttcgcgttctgaagcaccctgtcactggacgtgcacgcatcgtcgcccgtgccgatccaagtggaaatgttatcttgaacgctcccctgatgaaacagttcgactacaagagtaactctaacagggttcagttgctagagcccaaccagaccgggggattcacgcaatgtacagttcgaattccggctgaaagaatgcaagagttcctccaactggtcaacgagatcaagacctagatctctttttatctcttccccattttttcttcatctttgttctcccttccgggggtgtatgctaattcccaagcgcatggccatggtttgcatttgcgtgttctgcctttatggttcggtttctttttgatctcttgctttttgttgttgtttttctttgtgcatcgacccctccccttggacaaagttggcccggcttcacgccgtgggccagcttcaagcccaatagcatccgcctctttccttttgaacccagtcagggcccgggtgagtatctccctgggcgccacgggcttcaagtcggacagagtcggcgcggcttcacacagtcggtctctttttctttgagcctagttagggcccgggtgagtttctccctgggtgccacgggctccagaaaacgtcggcgcggcttcactggcaatgggccagcttccagtccaatggcatcggtctcctttgtgagctctgttagggcacgggtgagtatctccctggacaccacgagctccaagtcggatttcctttttttattgaagataatggggtctacattgtatttctgtgaaggtgaataaaaattgatctttttttctaagcatacctcgtaaatacatgtcagtaaatatacatcaattaactaaatgaagtcgatcataacaaagaccctgagaccctgagaccctgcggctgtgattttcgaggggccgagactcgggtggcggcctaaaaacccgcctatttaagacatcgctcttctttccagttctctccccgttccccttttattttcttctgcttctcagctgtcactcgttaaattttcacgctcgttcaaccgtccaaaaatgaaaaccttcgctctttctttcctcctaggcctcgccagcctcgctacggctcgcactgacctgcaaggctgcgtctcgtcggaagtcatagtcgagcaatactacgccagttacatctggtacgtccctggcaccggcgagatctgctcgttcctcgactgcggcggtggtcgtgcgccgccaaagaccaaccaaccgggatgtccactatacagcggaaccgcaacgcttactcccgactacctggcgggctggggacccaatggcaaacaggctgcctctacaagcaccgtggcgtcaacttcttcggcgacagccgcgtcgaccactgatgttgtgctcgcttctgccacgcagacttctgaggcgtcggtgtcggactcgtattccgcgtcttccgctttcgcttctttttcttcgtctgattcttcttctgattctggttcttcttcttcgtcttccccgtccagcactcaagctgctgatagcatgatcacggctgctccttcttctctcgccccggtcgcttcttcgttgaagatttccacctcgtcggcctcatctaccggtaacgctacctcttctgctgctgcggcgaccagctcgcccgctttcaatgctgccactatccccgcctctaatgttgccggtatcatggccgtgcttgccgctatggtcggagttatggtgctgtaatttcaacttgattttgtacttataccttgtggaagtcggatttgtacttagtttttggagagaggagacgggcttgatttagataaatactcagaaatatacccacttgcggaacaaccccctattccttgtccatagcatgtcacaccactgtcccacggcaggagaagagtttgagccgcatcgccgatctgcacgacccgccctcttggcgagactctctccacatttgaagtcggggagatggtccgtgggaatgactcgacctgtatattctagctgacccgggatagagcctgtctgtctcttgaggtcactggtattgcaaacatggcttgaagtaaggggtaattgagtttgagatgcagccatgtcgtgtttttgaaataaaaaatcactagatgtagtacgttaccaagatttctttacttctagcgatctttagttaggaagtggaaggagataattattacattgaggtatgtacaagcagatcgaaataaccgaatctcggggacggactccgttcggtccgctgcaggcccaatcaactatattgcccataaatcggtggcatctcaccaaaaggaaacagcatatcgaggggacaatctatcatgaagttgtagtccatcggggcggcatttgttggcagggaggtttgttccagtgcttcttttctccgccgatgcatccttttaatcgttaccgcgcgattggtcatccttccaaatatctccggcagttcagcagacttcggatcttgcgcaagagcctgttcgaagaatggaagttcttcttcgagcttgccagttatacgatcaacggtctggtcgaagtccattatgctttccacgtatgcgcggtcccatccgggatggtcatatagagatagctgggaaagagtgacgattgccttgccaaattgacacattatggtgaaggggaagaaagggaaaagagcagaggggagagagaggatgttttgcaaaaaagaggttgtcgcttccacgcagcggaaaagaagatccagttgtatgagaggatgatcaccgtagttaggtttgggttcgttaataagcgcaacccggtaaagatgtagctcgagcgtgttgtaatgaagctgtagaatggctgtcgttgttgtcagatcattgttagattgtgcgcgaaaacagcacaacttaccattgtgtggtgcctgactcggcatgcgagctttgagttgcttaagttcggcttcaagccatcgtatgcttagaccaagtggcgggggcgctgatgaacccgatgaagaatagaggtcggtgtaatatagtgtgtgatggatcttgtctgccagtttcatcgctcggactagctgtacgagagaagcatcggtgggatactctgcgacctggtctaggacattgcagcattcgtcggtgtatcttgtaaagcgaataatcggccccaggtcttttacacatgttgagagcctttgaagaattagcttatggccagcaagaccaagggtcatacacacatggtagtcagataataacacccaagataggttcgtcgctcttccaacgtccgaaccggagtatgagagtcatcatttatagattccttcaaataactcagagcatagttcaagttcttctggtaattcagttcttgatttaggcccaaactgaaggattgcgccacgagtaagtgcacgaatgtatcaagctgggcagtgcttcggatagcttggcgaatctcctcttccgatttgagcacatcggggggttggttcctaggtcgcgggaaacgactgactgaaacgaaccaagccacattgatgagaagcccctgaagaagatccaggctatgttctcctctcatgacgatgtgctcggccacatattctttgactgcatgcacaatttctcgctgacgtggcgcgttttggcacgcgaccattgagatattcagatagaggaatggtttctctcgacgcagttcctctgctgtgatatccgggggcatcatgaggaatggaaagagagggaacattctcttggagaatacttctatcaacagctggccttcaatttcatcgggagcagcagggttctcttcaaccgtagatgatgatctcgtttctgggccgctttctacccgttctctggtatttcgttccgaggcggccagcatggcgaccatacggtctaatttagcctcaagtgcggcaacatctctactagagtgtcagcggtttcgcctgataatggtggacacttagtgaacacttacgagccacttgcgacggatttcttctcacgacgatgggcgccgggtgcttgcttttggcattcttttctcaagcgacgacaacttagaaaagttaatatggatcaagtataaaatcaactatatgctcaccgtttacaaggaccttcggtttccgggaaacatcgtactttggccttggcacaggttatgcatgccttaggatgacgggctccaacttcatccatgacgtcttagcgtacactaacaaggccaacggtgagtcggatcgagttaacgagatacaggagcagtcagatgatgaacaagttaacaactcgagtccgatgtgtctgactgggaagaaatgaaggaacggaactccgcacttgatcgcatttttattggtcaagttgtatcatagtgggcctcagctactatataaccccctttttatatcagggctatgctatgccttgccataacttcatacggattgtcaaatacctccttctcattctgtatatattcatacgtagaaagtaagaggggttctctctgtatgcctaggacgatgcaatatagcacattcgacaagtatttgagcagtcgcctaggttgaacattgaacgccttgttgtgtacgtagagcgagacgatagctgcgtcattggtgagcgtatgttctcgggagtcagacgacttcgcctgtcgtgtggtcggtgatttcgtcgttctttagcggctccatcaccttccttccatgttgccctttgtgagtgttgcaatcatctccgtcaccgtcgcctgtgaccaaactttggaccagtcaaggtagtattttcttccttgcttctcagatcaataaatgcctaagcacctcaatacctatgcttctatctcatatactaggtagttctctggcttagaacctggttggtctcatcgctgcttctcattccccactatgtttcatatctctagatgcattgctcccagcgtaaagtatgccagattaggcgaaaaatccgtaatggtcgatcggaccctaggtagtctgagaagtctcgcagacgtccataagaacttagtggcatagccgcatagccccgattgacgatttgcttgcacttatggtatttcggtatgcaatacaagcgcgttacgtcctaactactaggaatatggtggtcattactagatgctaatttctgcttggcatcatcccaattaggcaggtagggcttagggtttcattgctttgctctaagcctgcttagtaacctataaatgcaggtctgtttcccgctaatcctaactaattctactccgtagctgaattgctgtccaagggcgcctggtgctgcttggtgttggggtagttaggtgatactccgtggagatgccccaaattgggggtccctagtgcctaggcgaagggacccatagaagtggtgcttcggagtcggaattgagatatcttagtatcagaagcattgtgagcaattagcggcatctaagcagagattaaggtcgagatcacgcatattcgggtataaaatggagaaactcagtatcggaatcatatatgaggttcaaaagctcattgacatatgaataccagttagtaaatattccgtagaggatctattaccccaaatagtggaccctgggatgcttcctgggagtaaatgcattactcaatagagtgacctgctgaacgtctctacttcggatcaaaaagaggcctaaaataccactggactccaataattgaagccggataagattaccagcctatctacacggaattagtaagaaccaagtcgaaattactccaacatctccaacatcgacctcacgtacaacaatttgagcgagtaatgttgaaatctgcttatcggcgaaatagccgtccccgcaattcgcaacattcgcaacgcgcaactccgatatcattccagtcattctaatagtcccctcacctccaactcttcttcttcctactcctaatcatggctaccttcttgaaacagcccctcaaattggctcttgtccagctcgcatcaggtttgacttccaagatctgtcaatgttttcccagctgaccgaaccatctaggagcggacaaggccgtgaacctctctcatgctcggagcaaagtcctggaagctgcaaaggctggcgcgaaattgatcgtccttcccgagtgcttcaactcaccctatggcacgaatttcttccccaaatacgccgagaccctccttccctctcctcccacgattgaacaatcgccctccttccacgccctgtcggccatcgccgtagaggcaaatgcataccttgtcggcgggagtattcccgagctggagccatcaacaaagaagtactacaatacctcgttggtgttctcgccgacgggcgcgttgattggcactcatcgcaagactcatctgtttgacattgatatcccgggcaagattaagttcaaggagagcgatgtactttcacctggcaacgagctgacagtcattgatctcccggagtatggaaagatcggtctcgccatctgctacgatattcgtttcccagaggcagcgatgatcgccgcccgccagggcgctttcctcctcgtctacccggcggccttcaacaccaccaccggtcctttgcattggtcgctccttgctcgtgcccgggctgttgataaccagtcatatgtggcactctgcagcccggcgcgtgatctcgatgccgcctaccacgcctatggtcacagcttggtcgctaacccaagcgcaattattctctccgaggctgaagataaggagactattatttacgctgacttggataacgattccattgcggacattcgcagtggaatccccatctccacccagcgccgatttgatctttatcccgatgtgagcgcaggccagaaatagattttgggagactgcgaaggatttttattagaattctatctagagaatatagtctcaacttgaacattcagagaacttcattaaatcactataacagagattgaataaggtggttattgcctgaggcatcgatatccacagccacgatatcattggctgtaaatggccccactccgtccaatcaaaccccgcacaggcaagcgagaccacactgaatttcactcgaaaatcgaccgcgaactcttcttctgacaatcgatcacctccgcccaccgtcgaccaccccttcagtcagtctattcaaatcaccactccgaatttatcctctaaccttctccgcagagatgtccaacgtcaagactggcaacaagcgctcggctatcgccgatgtggtgactcgcgagtacaccatcaacctgcacaagcgagtatgttgaacacaaaccctttccctgtctacctgcgacgattcgaatacgattcagttctggaggcatatattggacagagaacaagaacctttttcctgaaaatggaatttgttacggaaaagaatgtgtgtggtgtggattggtgtgtgtgtgcatccggggtcgaatgggaaaccaatcccccctatgtcacactaccaccctcaccatggcctgcagagaaatctgcaggtaggacatggcgctttcgtcttttgtctgcttcgcgatagagacagccgagcggagatcttgaaaaagtcttcgctcgcatccacacatatccgcacccggaacacaaaagaagaattagttttatgaagtccactatggccgaaagaccagaacattcatcgcgcagagttttctctagcagatggcattcgggcggaagactgattgcaacttcttttccggaattatagtgccacggcgtcagcttcaagaagcgtgctcctaaggccatcaaggagatccgcgcattcgctacgcaggctatggtaagtttgagcgatctcccctgaccccgctcgggaatcagttcgctaacatgctcaactcaccaacagggcaccaaggacgtccgcgtcgacccccagctgaacaagaaggtctgggaagccggtatcaagggcgttcccttccgtatccgtgtccgcatctcccgcaagcgtaacgacgaggagaacgccaccgagcgtctctactcccacgtccaggccgtcaacgtcaaggaccccaagggcctccacaccaccaacgtcgatgacgcttaaatgtgtcgcttttcgttagcatctatgattccatgttccctgctggggtgtggtcggggttttacaaaaatacaaaatacctttccctttggggccttcttatacattatgtcatagtatcgtagtattccactttgattagcatgtcctagcaccaggagcaacttgacagcaggattattcaaggtcgctcaattacacctatgtctccactttcatatagtttagatcccttggaacctggaggccaacacgtgcattgttcgctcggcatacaacttacgtagactccggggccttcatgcaagtgagtactaagtctctagaaatcatcatttcctttacggtacctattgctttcacgcgatgagaaataagccgttatgttcactgtccaagttgatggtccaattaggattaggcaggggacccgtccatatacaacacctaaggtcttggaagaggattgtgaaaggaaagctagtggtgtttcttagctgatctagggtgtatgtcctagcatggagcaaataatattaacaattataaataaagtacaactaccgctcaggatttcgagtacgaagaaaggtgaaaaaatatgttgctgtatatatcggtgccgctgctttatggtggcgcccagggtcttgctcactgtattccacagcacaggtgatcactcagtgagcagtgagcacttagggtatgcttaataatgtccaaatattgctcaattagcactcagtaagcgctcaggatatgctcagtctatgctcagtctatgctcagtcagcgctcaggtcgaaagaatgatctaggaagccagggaaactgagcgcactatactaagtatgcgaacctttccatttcggcattcgtaagaataaaatcggtctcattgcgctgcttggggcgaaggtatacgtcctcgaaatcgatcttgagggatccgccaattttagttgggtgtcgaacaatctccatcttttgggtgggcaaaggatttgctccatgtgctggaggatcccaattctcgatggtgatcttgctccgagggtaaactgtgattgagaagaccacattgacctggccgttcccctgggtgtgccaccattgtatgtcatgttcaagctgtgagattcctctgatttctcgagaacgaactgttgagatcagcaaaatatacctaggtatataatctttttatctctgttttctaatcgcttcggtactaaagagcagcacatgtcacctcgaaaatttctcattgttccacctctgcgaataaagacgaccacgaattgaaccagtcggccgatgataggccatcgaaccccaacgagtccattacatttgatagcacgccatccccttggttatgattggttgcacgacttgtgtagtggcttgtattcgaagccctggctccgatgcttgcggcttcagttccccaatcattgacccaggttttaaaaaggtcatagcctaaatcctcggtcgacatcttcccagggctgtgtcccattctgtggtgaagagatttctgtagagattcaatacaagcaaccacagatggcgcagagcccacccccattgacatgaccccaaacaaccggagtccggtagataacgcattccgaagcttcgccgtgcgtgtcgagattgattgtgcaagaatcgccagcaacgccgcccgacatgcactaaattccgtgaaggacacccgggcaagacctatcttgtcatcgagcagagtgcacaggttaacgacctcaaacgaggctttcacacaatcagcttctagtatcgactttcctggtagatcatcctctatatcgacggcttctggattgtggaaaaaggaagttgtgaccctctcaatcaaaggataccagcctaggaagattctaatcaaacagcagtcgagttgcaggtgaatggtggtgcggaaatagccacttgatggaccgaggtctctgcacaaccctccgtttggtaggctggcccaccaagccagaaatgattctcgttgcgaaagtaaattgtccaagcattgctttttatggtctgtggatgctttccgtagcgatgcactaaaggagtatgagtagcagttcacttatcgcttaagcattctccttacatctcagtggcgaagttcgccaggttcgatgttaaacaaatagaagttatcatgtttgaaaagttggacgggtcatttgctggtcgcaagctagggatatttgtgggaaatgcagcatcaacttccgcaacattcagagaagtgggcttcccatgtaatatcccgatgcgcctgattttattgtcatcatgggttatcagtacacgaatctaatataactgcatacctttccagggaatacgtggtccagaataccctgttcctaatttcgatggtttctgtatcgagatcgtgcccggtgtatcgcctatgcattccattttggactgccattctcaatgccaaccctaaataggtgaatgatagaccagatgcatcgatatggataaagtaagtccccattaagaggcatgcttgaacagtgcgcagtgaggccgaagcaattataaggggcagaagtttcgacgcgaatcggtagaatttgagtcccagttcgtcttcggagaattgagtaccgcctttatgatctggtacagattggatctttcgatcagaacgaacgcaccaaggagaacccatgtgcgcaaagcgagtgccgatagccagtgtcattagcaagacgcatacagagcttgcgtcgggatgtggtaactgcatttgagccgagtatgagtagcataaatttagtgtctcgcagagctggctttgttccacgtagaaatcatttgtctgggcataattgaaaaaagagttgataagaaattcagcaacatcgcgcggagggaggcactccaacgacgaggaaatcaagcctgtttcgctttgcaatggatgcgcactccactgatccccaaataggtctgttggctcatataccttcatcaatcagttagtcaaaggggcttactgagaaatgccttttggacaaggttgtcagacaatacctctgggagtgtgttacggaggctttggtggatgacctgttgcattctcatagacagagacacataggagagctcacctgcgtactctttggcccacaacgaagtcagctcattggtgtagaagacgaaaacagtatcgcagctttgtagtaggccagactcacgtgttgtcgtgttcgactggggactgatggcaaattctgtatcttctgccaagcctattgacataatttcattcgactgaccagatttcacctgtccagtggtacttgatttgctgatttccaaagccctctctcgcagcgactgcaattcgagcgatatatttgggacataatgcttcaatagtaactccatccagtgaattcgttctctttcgtctgttcggtcaaactcttctctaaaacgtctgtgatgcatatgagcgacatctggagaagcaatagatctagaaattaccggtcggaatgtgcggcttcgaagatacattgctgtccaaatcgagaacatcgagagcaaggacgcccgccctcgcatttttccttggccttacggcaggcaatgcatctgaggatacgataaatcgtcagtgacaagctgtctaccaggatgccatcctacaagaactgcaggaaccaggaagcgggaccgtctcacgctcgagtagctcgtttccgaagttcttgtgggacaggatgccgccatcgtcggccctttctagaatcatccatggctggttatctcgtcttctagcacatgaatgatggaatctgagaatgaggatgagagttctttgttcaccgccctgatcatgagatcatgtcacgtgggaagattgtatgaattgtacctgcccgctaactcaacatcttcatgttaccatttcataagatgtttagtcaattcgttacgcgtcgcctcgcagaaaattacggaaactttcgatggggactgtaaaccaaatacagtagtggggcagtggggcgggagagtgtacccggatccactaagtgtttccggcaggtacaatcatatcatctacaatacaaagcgtgatggggacacggtgattttgaggattttaacagagtaagaggaattgaaaggcactggaattgatttgttcaaaatgaagagtgcaggacttaagtatcgtgataaaatagcggtcaatttcgacttcttaagcaagcaggtcttcgcgtctcgtatacgactcatcgacattacaggaccttgtatattgtattcgtaaatgcgctatgaagttgaactataactagataatatttgccattgaaaaaaaaaaaagcagattcaaaaagtcatacatgtaaatcaatccgcaaatcatcgtccactggtattgagcagccattgtggcatttcttttgcataggtgcctcgacatgccgcttcgacacattgcatgagacttccaaagaaaaactttcgtcctgtcagaccaggtccataatgagcatatttcccagaattagtcatgatggcattctcagttgtcaggatcgttggtttcgtgatcatacaccagcaagtgtctgtaatgaattcgacgccaaagttctccaattgttcaacccaacccgcttggctggctaagctataggaagaccgcccacatgtcaccacgatggaaacatcttgtgatttagcaaggccttcacaaaggagagccaatgtcttgatttcttttattgagaaatgcgggttccccagggagacgagatcgatggactgatgctcatgtgcactgttgagcttctgccagggctcaatcagatcttccattctaacggcgacggacggcacctggtgtgtttcgtccatgatattgctgagcaaggctgcctcgggggtgacacccagcatatgaaacatgggcgcgctagaaacggttgcaaacgcagccccaaaggctttcaaatcatctttggatggcgccaaattctgtagtccaataaccacgggaatgcgatttgcagcaatgcttccgacgtggtatcccaatatagggaaaaaggaatcgtcaataccctccacatcctggagatcaactgtcacgatgagtgacgccattctgttgatgtcaacatgcggtcctgccttaggagcgcgcccagtaagggcaatgcatatatccagataatcgggatacttcatggtcctagccccaagtacgctattggcatagacaactgcattagattctgcccaagcgacttgctccccttttcttggtgctgattgcagctgatatggcgcgcaggtaaaggttggcttagagcccatgtcggtgtatgccttcgctaattttgcggccgcttccccaaatgaagaatcgacaccttgatcacgccatcgctcttgatcgatcgagatggaattgagcgtggtaggaactcggaccttccctccccagtcccggagcttctctgcaaactgaagagacccggagcctgtataaacacagccatccacatgaacttgagtcacattcatcagttcgtgggctcctaggaggcctgccatccgcaaaacaatccgaattgcgatacgagaggcctccccgtggagtccttgaagcagttctttgtcgaaattcgagagctgcacatcctcagcaaaagagcctccgtttggctctttttggagctctgttcgtgtgtcactgaagactctatcggaaacgcggtgggagtcgacgtagatagcattccctttcattctcaacattgcccgaaaatccttcggtttcaatacgacaaccggtatggtcttcccaaaaatctcctccgagaccaacaccccgagagtgagaataccctcctgtctttcaaaaaggattgctcttggtcctttcttgttcaggagaagttccaacatgacaccacttccagagcatgaaccacgaccactggggatagcaaggacagtatcctggagatggtagccactcaaatcgtgatgacggtcaataatctctcctgtctgaggattgactccaccccagaagctgagctctaagtcacttgcgatgagtgtgccgcaagccttgcctttcacatgagctgtaccctcaacaactaggccaacgtgcggactcatgttcgaatggagatctctgaatagccggtctccgatgaggtcttgtatgcctcgaacagtggttacttgggtgggcaaattgagtgagagaatatcgagttgatcgcttatctcttcggggtatatccgcgagggactgatatcacaatcatgtacgcctaggtcgaccagtctcgcacccacaatataattggagtattacccttgagagcagataagggcagcggatctttgcctcggaattatcacaattcctttggcttccccagttgccatctccagtaagcctgtaaacccggaacataaagagtggaaacaatgggcgggtgtgtacccggacccaccaccggctgaaacaccgaaagtctcgttggcctcaaccccggcagtacagcagtgaataggcgcaagtccgcaaaacacctatttggaccaccgccgagtattaacgctctgctcgtgtaccgagttcttttggagagttagagaatttattgacatttttctgccacatatacaattgccttaccaccgtatttccgtcaacttctactgcccgaaatgcccgagttttggaatttatcttcccttcagtccagaccgccttccgtgcacctttttctagaccgaggaataaaagactggcatcggatcgccataaaagcctaacgctgcaagggtagcaacttgcctccacaattttagctcatcttggaagtgttatcccaattcgatttgactatcacccgggccagccgcactggagataagtcctctattcccgggaatgcgtcatcaggtgatgtctctcgaaaggcatgcctccggaccgggggtgcagtggctgaaggtgtggatgtatggtacatagcagcccataacagtggagccccctggtaagatacaataacacttgatttgccataggctggtggaacttgcccgaaccatttggggattctagtgactgacgtaatgcgagaggtttctctacactccaaaacataggttacatagggttctgggatatgttctgtaatacgttcccgccgcgagcggggttttcggccgaatgcgagaaatcgcattcgcatataaaagcgcactgttctcatagctgagggattacatcagtcgagcttcatcactctagtcatatcgtttggaaagaggaaggattcactgcaaatttccataatgtgtgccaaaatactactggcgtttgatctgtatggcacattgctgtccacggaatcgattcaaagtcatctgcagatacatttcgagccagaaattgcaagggcaatttcggaaaaatggagacgtttccaattggaatatacttggaggctgaatagcatgtgtgagctgcctagaatgttccttgcatcgatagcagagctgactcatgatagcacgttacgaagatttcaccgaggtcactcggaattccttgttgcatgcacttgcggagaacggtcaatcgcttgatgacgcgagtatatcacagttgatgatggcttatgataatctgtctgccttccctgatgtcgcgccagcgttggataaactgagccaggaaagccttttcaagccggttatcttctccaatggtagtaatgtaatggtgtcgaattcggtgaatcgttgcctctcgcagcatgccagcatttttcacgggcttctcacggcagacgacatacaacgttacaaaccctctcgactattctatcagcgtctagctgagcaattcggcaagggacttgcaaacgaagatatatggattatcagcgctaatccgttcgatattgtcggatcacgcaacatgggcatgcgtgcggtttgggtcgatcgagcaggctcaggctggaaagacgctgtgatcccggatctgaagcccacactggtcgttcatagtctccaagatgttaccgacaagatccaagcctatatcaagtgattgtccatcgaagaatctaccatgggcgaggggaccagcacaatcggttcttgatccgtatcatacggtcctcggcctttctcgagggtaccccaccgtgtttcgagcacaatttcgctcgctcgtgtttgaaatagacgaattgttgtcttttgattgatcaatatgaagattgtttggcgtcacatctgcgggctcgttcaaaatggtcaccgtaatagaagctgattggaagacgtcacatgtgagcgtagaaagacgccctatcgccgctccatgtggaagaggcttcgtaatgtgagggaaacgaataatttctcaccagtaccgctgtcttcgctgcgtctgctaccgttcctctaccatcttagtttgtcccaggtcatttgggctagatctgatactgcgttcctagaccgcagtgccaggtaacccatcatgtccagacaattttcttgtcccccttgactgtttgaggtcacctaaaaagctattatttaaatgacctcctatgctctacttgctaaaaatcagtcttggactaattcctttcattttgagctgcctgctgagctgacggcagtcctgtagagtggcacaaaattaaagaatacattacatcgaacgaataactgttcatcatgaggaaaatccaatcgaaatcactgtttttggaaatcctcgcgtatgatacgtactataggcaatatttttcctatctcatcattcacagaacactcaccaaccaatcttgagccaatttgaaacctgggtcacctcccatgtgggtctcattagggaaaagcttgacgagctttggctggccaaaatcaagaggtatcagtgtgtcttcggctggaaagaacccatcttttatcccctatcaaaatttgagatttaccatagcaataataattaccgccagggtggagaaaaacttacattgatcataagtagctgcgttgaattctgttccaatgtaccatctaggacaagggaataatcctgcatactattctgtttgaactcatcgaggctctcgtaaccccatttagacgtcagcgcaggggtcgccctgtaaacgttgttagtaattgatacaaaaacaccccaaagcaactatacctaaacgcatattcgtggtcgtcattgtgactaatccagtccgggctaaatgcttcatgcaccggagtcccttgggcgacgaccgaatgcaaacgatcagagtgggtatgtgccattctaactccgtaatagcttcccgtcgagaatgaccagactccaattcgtccggtatcatattgaggttggctttccatccaattgagcacactattccatagacgatccccggccaccgggtccgatcggttgcttggacagtcacctgttcctggcacctcggccacaacaacctcatatccctgattgacggcccattcggtcaatggattgaagtcaggccgaaattcgtcgacgccagtaacaaaaagaagaactgggtgtagtatggccgaggattccgaatctggaacatgtcggacagcaaccggaatcgtaggtccatccccattagcagcatatgtgtgatttatttgcacggaatagactggaggatcaaggtatctattaagaattcatgatcagtgcttagctaccacgccaaaggccaaaaatagagatcggggatttatatggctacttacttggcgctcttgaagtaagcatcgacctgcattctccaagcaagctcttttgtgggtataattggtgaaggatatcttgcaatacgtaagacaacagcagcacgactgtttctctgtcaatcagctccctttcccgagcggaatcattctttgcatgtcttgcaaagtgagcactggtacatacgtatacaaatctcccgcaatctgtgtattccggtgattttctgcttcctctgcccgggaaatgagatctctggcagttggaagaaaagcattcacatattcgtcagtatttgcatccgatatattatactgtagtaacatcaatatgaaaaccccccgaatactcataattgaagaccctttcagcttaccttgatcagatgatcaaatataggatcaaagtctgacacatttgcgtcataaaagggctcggcctgagcaatcgcctaggaagtttagccggaattcaatctccaataaaaaatgaaaaagtatgacaaatttaccaatggctgccacagctgattccacaagtaatcaatatttccatgttgaggttgtatgacatcaagatcctttcctaaaagccagtcactgcaagtcaagacctccgaggttgcagcactaaagagcatgctagcaacccaaggaagaatgccttttgaaaccattctagaactagatcaaaataaaaacgatgatagtaaaggcctgtagagatttactcgcttgctggaatatatcaaattgttgtctcttggtctatcttccatatataacttcacatctcgggttttcggagttaagagatgaaaatgttatatttttggggccatatccagtattcgccaagatttttcaaggcgtacagattgtcaaatgcctcggaaatagagccgggaacccatttatagccggttgctctgctaacatagttggccgacagcaaggacgtgcggctatgtacaatccctaggcattatctccgtgaaagttattcaacccaatgatgaatgattccaggaacgagtcaagccatcttgtgtccctgtttgtttctttctcaattcacttacgaaggcagcctatctactacagaggctcaggatctaatacagacacaaagaaagggaggagggagaggtcacaccagcggagcctaattttcctccctagactggaggtcgtcgacctccaacatgttcattatgtggacttattggccatcactgtaatatatgcccaactaagcaataatttccacatttggctggtaatcgcgatctatttgcggagtaataggattatgaccgggaggctactgtattgtggagcacgacggagctgccgcattaggtttactagtgacattttgattggtggatatattacggacgtaccgccaccaaacgatgccccaccactgatcgggcttaggaccttgtaaagtccgggggataaatgaccccgtgtatgagaacatgaggaatataaataagatatttctttgctctagtctctcacttttggaaccatcaaagcttctgaacattaaaaacacctattcatcatgtttgcccctgcttgtaccccaaaatcccatctcggccgttaccgtctcctcgcccccactgccagcgttaaggtcagtccattatgcttaggtgcaatgaacttcggtgaaggctggtaggtgcttgatatcaatcaacgctctctccaacgctacaattgtcaacaggaaagaacgactcggcgaatgcaacaaggatacatctttcaagatcctcgacacatactacggcaatgggggcaattttattgacacgtgagtcaaacaattgttgcttgtctctattgagatagacctaacgaacagaagagccaacgattaccaaaacgaagattcagagaaatggctcggcgagtggatggaagctcgcggtgtacgtgatcagattgttctcgccagcaagtataccactggctaccgcacccatgttccatctgagattcaggcaaactttgtcggtaataatgccaaaagtttaaagctgtcggttgatgctagtctcaagaagctcagaacggactatattgatctggtatggccactatgagataaaagaacctgttatagctcagcgtttgctaaattttggatgcagctctatgtccactggtgggattttagcacctccattgaagaagtcatgacctcactcaatcagctggtcctatccggaaaagtgctctacctaggcatcagcgatacacctgcctgggtcgtggtgaaagcaaaccaatgtgagctcacctaacctcgaccgacgaaaacacactaacaaaacccagacgcccgctaccacggcctacggcctttctccgtctaccaaggcagatggaatgccgcggcacgcgacttcgagcgagacatcatcccaatggccgcatctgaagggatgggtcttgcaccctggggcgtattagggcgtggcaacttcaaaagtcaagcgcaatgggaagaattttccaaatcaaagagccctgggcgcggaagcacagctacggatcaagaaattgcggtgtcgaaagtccttgagagtgtcgcaaagcgacatggggcggcgatgacaagtgtggcgctggcatatgtcctgcacaaggcgccttatgtaacgcctatcatcggcgggcggaaggttgagcacttagagagtaacatccaggcccttgggcttgatttgtcggatgaggatatcaaggagattgagggggcctatgagttcgatattgggttcccgatgaatttcttattccgtggagagaccaaggaggcgcatcctcgtaattcgacgcttcttaactcagccgctaagtttgattaccctgatttggtgcgtgctgtcaagcccaaagacctagatgcttaagccttggtcgtatttggattggttggccacgcggagagctggacatgtaattgaatgtcatctcaaatatagtcaaatcttgacagctacaaattccatactaaaacttcccaacccctctgggccttcctttaatctaattcatcattccgcctttaatcatgatctctgtggaactaatccaatatcgctggcttcatggttttatcaggacgaacgtattgtacttacaccaatgactagattgcgcatcaatacgttcaaccctttgaaagacaactcgtgcgggtgaggagtgtccgaagaatgctctttgtgatgggtttggctcccttttcaccttcgaaatggccaaactctgcgaacatagtggtatcttcatcttctgtatccttccgcatactagtaatttgctttgaagtctataagcatcgtcacggaggcaatcgagaaaccctaaaattctgttcggtatttaaaaagcatgattttttggctgaaatcaattcaattcgcgtgaagaccttcaactaagcacaatgtaacttggatttttaaggcacttagcttatcaatccgagaattttataactaaccaccctcctctcatttgtattaatgcaatatctctaagtaccacaggaccagttgaaaatgtaaattaaaaagctatataaccccaaagataatcaaaatcaaagcagagaaccgacgtcgaacagcaaagcatcgaacaccgtggaagccaaggcggtgagcgagagctctccaaactgccgacgtgaggacatcatatcagctctcttgcagtccgcatcaaccatcaacatctccaattccgtccgagtttacccaccttcctctttaacccagcataccgtcctctgtcagtgataccaacttaaacagcacacagatctccaccatggagtctaagatccccgacttcttgctcgagcagcaagcacaaggaagcccggagacacaaccctacttcctcaccttcgaagattactgggagcgcaaactatggcaccagcttacagactcgttggtcgagttcttccgcatgccagagagtgctccgcatcgcttagccctgtttaagacattcgtgctcagtttcgccgaccgaatcaaccagctcaagtttgtgtcgctgggattgatggcagcaacagaatgcgcaggttggtggtccacagtctagcccgaaagctcaaaaaatcaccatgatgagtgttcgattgcgttgatgtaagctaaccatctccctctagatgaccaagaacgactagctttcctcacatccctcgccaacaagacggatacgcccgacacacaggatgcatatgtctacgcgctcgctgacgtggccaacgtcaagctgtcgctgaaggatctggaaggagcacagacggatctggccacctgccagcgggtgctagacacgttcgactcggtcgagactgttgtgcacgcgtcattctacaaagtgaatgcggactactaccacgtatgtgattcgacttatcctatgtccagccggacacggcactcaaactgaagctaacaccccctccaggctaagcaagaattcgcctccttctacaaaaacgccctcctctacctcgcctgcattgacctggaagaactcaccgagaccgagcgcgcatcgcgcgcgtacaacctcagcgtggcggccttggtatcagacacgatctacaacttcggagagctcctcctgcacccaattctggactcgctgacccagaccccgcacaactggctccgcgaccttctcttcgccttcaacaagggcgacctgactgcctacgatgtgctggccggtaacatcagcaagaacaagctgctggagtcacaccgggtattcctgtaccagaagatctcgctctcggcactgacggagatggtcttccaccgtccccctcatgaccgctctctctctttccaggctatcgcgtccgagaccaaggtgcagccggatgagatcgaacatctcgttatgaaggctttgtcgctgggtttgctgcgtgggtctattgatcaagttgcccaggttgcacagatccactgggttcagcccaaggttctagatatgaagcagattgatggcatgcgaaaccgtcttaaggaatgggatgctggtgttaatcagctcggtcactggatcgagggggctggtaaggatgtttgggctgcatagatgtcttatctcacttgtgttctgataagttctattataatgaatacaatggtgtcgttcttatggtggttccaatatatttttagttcgaatatgagtgagtctacatgtgatctacatgttttcctgactcgatatctacttcactcatcaaggaagaataagaagaataagacattcatagttctagaataacaaaccagaacaacttcattccgagaaaagaatctatatacacaactctccacatcccctttaatatccattaatcgaacactccaaagcagcaaaagtaggcggatcaatcccctcagtcctattatgacatcctttaggctgataatacaacttccaagtatcaaagcaatcacaatcagtcttagtaaaaaccgagcaatacccattcttgagcagccacgactcgggtttcacaagtttgctcgcatcacaactagtccacgtgaggctattagaagtccaccatttacaggtcacgcctgtctcggtgaacttgctattgaggcctccatggagcgccaagcagcccttgtcgtcgaggtattctttgttatagccctcgaggtggtagtagtcgccctggcagtttgcttggctgtatagtgtgatctcccacggtgccgtccagctatattgagacgcgcttgctttaggcgcggcttgtgttgttgttttttgggtagtagtttgtttagttgttctagtgattttcgtggctttgatggtggtggttccggtagtgctggacctggaggtagcttttgagcctgcgccggtgttggtggattgctggactccggttgcctttgccttggtagtgacttcggacgtcggggcctctgtcgcccctttcacggtggctgtaggaccggcaggaggtgcacggtaaccctcgcaatataaatcggagacaccacattgaccccagaacgcacactggtagttgtcaggactagatctatacggggatatggactttacttacacatttggactcagcacatgggttcaaaccagggaggtcggcccattttgccggacgtgttgtgccaggtacctgtgggccgcaggttgcatgcggaagggccattggcatcggcggtttcccagcgctgagacaaatgaagtcgccctggtatagtcgtccgcatccgagccacgcccaggtgtttttattgaagctctcgatgtcggcctcggtgatgccgtgtgctttggcaatcagcgcacacgtatcataaccctggatgagatagacgaagcaatagccgtcgctggttggtaccgggacggcggctgtcgcgagacgcaggaagagaagccatagagcaaggaagtcgattcgaaagagacccatcttgttcttgtgtagacctgggagatacagccatttggtcgagtaacaaggctcattctttatatagattgatagagataatcgcggccgtgtaatcgaaactggatagagacgctgcatgaaagaaacagagctgtttccgagttagggcatgacgcatggaattggtcaggaacaatccaatattcatgcatgtgatgaatgtgagatgttagtattgttcaagggcctgacaaagactcggggaaatgtgtcgtatcggaagtttgacatcctggatgctttcattgttcgcttgaatcacccgtgcatgacctctctgatatagtatgcataaagttgggggcggtctttgtccaacctctcttaagctcttctagcgtcaaatgccgaatgttctttgatcgtaattggccgctgcgaagcgatagatgcttgggccttgagagtaagaatcagaaatcgagtcagttctttgaagacagggacggcgtggcaaatgaaacacattaaagagggcgtacacattcagagtacatatttgagcagaacatgtacgtacctagctacatttaaatgcacttggatgtgtatttgcattgcattggtattgaattggtgcctggacgtcagccgcagttgatatttggacttcctgctgccagtggtatccagcgcgctagtcatctttgtttctttgtcttggaagtagtacgtagattcctggactttatttattaatatcctaagcattggatcaatgcggcaaagcgcgtgacacaatgtacaatatagtaatcagaaaatcgacgaccccagcaacacgcagccaatcaaccaagccggccaccacacacaccaaacaacgacctgggtccacataccccaaacatcccaaccgaaagccgcctgggtgaggacagtctcgactgagacccccatataccagcagacgccaaggagaacagctggcggggagacgaggttgagaagcaccagacccagactggaggttgccaagcggaatggcacggagcctcgcaggcgagggatgaagctaagtggcgcgcagagcagaccaatcatgaatgaaagggagaagttgagggtggcgagggttgagagggagagacccagtaggaggagggagaaggattttatgaggtggtactgttgggggatgattggttttgatacaccgaggccgttggagagaattgcggcaaggagaaggggtaggatgatgtccacgaccacaaatatgtaggtggtagttgtgaagtactgtagattcgttagcagctattatcattgtggttgtagactggcagatctcacctgatggaagacattattaaagacccagagcgggacaaggccgagtagatggagtccgacaacaagcgagagtggtaaagcaaggtatcgttctgcgatagtattcctttcgacaatagtattcgtccccttctcttcggtgggtgccttctcattctttggtttagcacttggcttgctttccggatagtacccagtacgtatccagagagcaattgccatgatggtgaagtttccagcgatcaacatcgcgctgggcaagtaggttccaatgctgacaaaacggttggactgcatgagcaggtagaagaaaaagctctggtgcaggtgctctagcaagttgttcaagctgcgacaaagagactcaatcgtccggcccagggccatctcatcctcccatccctcgcccttggtctgcagtgtgatagcgtcgatatggtacggcatgaagctgctgtgtgcgccggtggcatacccgagaccctgcttggtcataccgcggaacatagtctgcagacgatgctcgtagctgtcgtcgtgaccccacatttcctgtagattggccccgatgcccatctggccgcctgcaatggctacagctgtattgaacaggtcgaggttagggagttggccattgactccgtcatatacaatatggagggtctggaaccggtgttcgaatgggtattcgatgactagtgcaccttgcaatgctccactcttcaaaggaagtggctgcaccgaagccgggtgcatatcgtggtaggcatcgatccaagcctgagtgccagttttactgtccggaggaattaagaagatgatatccttggaccataacgaccatcctagatagctgtcaataactcgactagaggcacgcaaccacgaaactcactcttgaagtatcttgccaatgtcaaggcaagagtgacaccattcaggttcagctcatcatcagccgtcttccacggcgcaaccagcacaatcgcctccgtggcatcaccgcgcggcgcatggataatggcataagtattctcgccctggtgcgtaatcccagcggaggtgtattcgtatttttgcgtggcaactttaaggcccgccgcttgcaagattgattgcaacttgtccgagagcctgtcgaagtatcagcgaatagtccagcctgtgcccggttcatttgacatacgccgctgtcacttccgcctcgtctttttggccgcctctcgcctgtccatcattcaacaatccttccaattctttcttgtagccccggaagatgttttgctcgcttcccgtgaaatacgcatggacttggcccggcagtagcgcattctcggagatgtaggtctgtcgggagtactcgtttagagggaggagaagtagccagacgacaccgacgactatgcagatgaaggatacgagattcgggaggcgaacatagaggaggttggggttattccgcaagttgcggattgcagctggcatcttgttagttggggtcctcggtgctggcgccaggaaggacaggtggtattaggcttctttgctcacattttaatgccattgactaatgaccatcgggaaatgagttcccgtgccgcgaaggcgaagctgttaaatgagcggaataattggactgaactggagtcttacaagtcaacagtggagatagagctcccgttgttgatgcgcgaggaatttacgccgaacgataaagaccaaccgtgcaaattaattgtgagtatgcacacgctatgctattatccaatgtccccgagtctgcagcaatataaaaaactatagtggaaaatatacattaaaatgaaatgaagaatgcatcaataccgtgatcaggttcccactgggtagatcacaagtagctcatggttgtttgattgttgctgctgacggtggcagggttgctggttggaagaactccatagcgaccgtaggtcttctggtcgacagagacatagtgaggcagacgtcccaggaggttcaacttgccctcgatccaacggaggaccttctcagggggcacaaacaccttgagatatccgaggccaactaacgacgattagcagtgggaagggttaattcagataagggaactcacggagatagccaacaaggatcgcgcagagatgaccaaggaagctcacgttcgagatgaggatggatacaacgacacatgcgaacaggggtgaggtccaggtaggaatcttgtacgggccaagactgaagggcgttagtaacattggagcaagttttccaagtgaatcttacctgaagttagggtgagacttgtatgtcttgatggcttcagagccgagaagcaggaaaacccaaatgctggattgaagattagttaccgaaacattcaacctagtgatctgaagcttaccttgcgccgaccaccgaagtatttctgtgtaggataaacctctcaatcaagatgtaaagtccagcggggacagtcgagagagctgaattattcaacattagtcaaaaggccgcaaacgtcgcgtttctagagcactcacgtccaataaacaacgcaatagcagtcaaagtgccatgctcggcctcgaatcgctccaacagcggtgcaactgccacggcattaaagaaagcatggaagaagcccgtgtggatgatgggataggtgttcagtcggtacactagtaacaccatcaagtcagcatgcgcccgacatgcttttcaacatgaaatcaaacatactagtccccaggttgatctcgtctggaatcaaagcgccccattgcacaacactccaaatagtctggaattcgagcagccagaaggccagaatgatcagcagcaccagtcgagtaaacagcggtagtcggaggaggtatgtccgtatccgacccggattgaaaggcaacggaggtaaagcggcaggggtcgtcatgattgctgaatgatgctaatccgtttctatcactttcgaagaaaatagatatagtgacgaaaccactcagggcggccggaatagagtcgggctgacaagtcgggatataccgcgactttgaacgagaggggttgcgatcggagccgttggtaagaattgacaattattcaacagtcagatggtggatcgaacaattaatgactggagagaaagatcagttagattctgttttcctagttgatctgccaagccgatgccagggataactcaccaggcgcacgcgatcctgggtgaaacgaagacaagggacaagaaccccaactgaaaacgagtagccttccaaatgtcaaggaaacaatctgaatggaaaattcaaactcgaagagacgtcaagggagaccgaaccattaaagcgacttgttcgcgaatattacgccgcgcgataaagaccaaccgcgcaaggtgtccgggtagacaaaccccgtggtggtgatttgacagctcaatctaccccgtgctgtctaggtctattcagcacaaaatgtgtatatcgcctttgcatttgctatctatatttaaaattgtccaactaatttacaggtgctcgttaaaccaagcgatggcctggcagaaagcctgctccttagcccacttctgcttggggtccttcagatcgccgcgaacagcgaagccatggctaacaccgctgaacaggttgatctgccacggctgggtagtcttgataagaatatcctcggactcatggcgaagctgggtagtgaagatcgagtcgacctctgttgaaacgcgaaaattagcctttgctgcatcctttcaaactaatatcctgcaaacaacttaccagcagcagcgatagacagaggccccttaatggcgccgagctcctcgtgggtgacgaacgaagggtgcgcaatgtaaccaacgtcaatcaggccgggctttatgttgcggcagacgaactaaaccaatattgtcagccaggggttatgaggtattttcggagattgaatctttagatctggactatagatacataccttagccccaaagcagtagccaacagcgccgactctcttaacgccgagagtctcccgggcgtacttaatagccgactcaacagcgggctcaacgtccgcgggcttgtgcttggggagccatgcagacaagtcgaccttgccagattccatggctttgacatcgatcgcgtcgccctggagaatatccgggacgatagtcaggtagccattgttggcgtactcgtcggcgaggagctgggcgttggtgtagattccgaagatatcggtcacgaagataatggccttctcgggggtcttgctgcccttggggtgggcgatataggcattgactagaaaatgactcggttaaaaaggacaattttgggggcgtcgggggcgtcgggggcttgagnnnnnnnnnnnnnnnnnnnnnnnnnnnnnnnnnnnnnnnnnnnnnnnnnnnnnnnnnnnnnnnnnnnnnnnnnnnnnnnnnnnnnnnnnnnnnnnnnnnnnnnnnnnnnnnnnnnnnnnnnnnnnnnnnnnngggggcttgaggggcttggggggcttcgggtggctgaaatagaggagttttataaattacctccgttgatagtcttagtttcgccggcgggagtgccttcgtgcttgaaaccagaggcacagcaggcagcgggagtgttggaagccattttgaaatatgaaggggtataaaatgtaaaaatgaagtacgatatcaaatcatggatagaggggttgcttataaatgtcccttgggtgtacaatgtcgaacttagagtctttgacccatttcgtcagatattatttcatccaatccaattggctgattgacgtattactccacttgcccctacttgcccctcatggagctctttggctcctaggggtaaacctcttggaccgccgccgttattaacattctcattgcttatgtaggtactaggtacctaaggctgaccctctggagctgaggctcaatggtcttgcactgccttcgaatatccgacttgcatatatccatggcttttgcccatctagaaatgtatgagagtaagatttcattgcctcggcagtcggcatctggcaatgacggaaataagaccctaactccttatatctaccccaacacgttacaatggtaagtttgaagagataagaaatcacattgcattcatagaaacatctgtactgcatatatctgggatactaggacatccagtcccagtcaatcccaccaaccgtattaccacattagtccattcacacattgaacgtcacaaaatatcatgtccgaggtcctccaagaaactttccttcccggggtatctttctgcaggaaatattatgtcgcatgaagaattcacaagcaaaatgactccgtatatctcatgaaacaaaaaacctcagaagtgtaaaggtggtatcaaaggaaaacaagtcgcagaatttttcactcgaagcggaagtttggctgagggcgctgtgcgcgcctcacggcccaggccttgagggcaattgtcaagatctcataagccataacgaaagcactgaagcctaggccgacagtgaaggtgaacattgcgtccacgtcgtagtactccatagtttggatcacatttcgggtctagatctttgttagtcatgctcttgggggaaactgtaaagcttaattgcacttacactcatcatgaaaatcagacctcccgagattaggcagaatgcagcgatgatctcggtcgggggacgagccgggaggtacgaggtcggtggcttgagatataacagaacgtatgtcatgccgcgcgacagcgcaaatccaaccaacatgttaccccactgcttgtgtaccatagtcgatgtcatgctgtcctggtggtgcgaccccatcatcatgccaagcaacataataactaggggtggcatggggttcaaggaaacgccctgcgacctcggtggcgtccaggcttcatccgaggtgccatgagcaggggtctggaggatggtgttgttgaccaattcgcggatccaggtagattcgaaaagcataccggcctatttcaggttagtcagattgattcttataaagagccgaaaaaaaggagatgggacgtactaaaccgccgccgaagaacagcacagaaatcgaaacgtgctcgaggtctgtagcagaccatgccttgcccgcaccggataggtgctcgagaaagacatttgtcgcgccatataggaaaatgacgaatgattctgtggcttcagctgatggaaccttagatttccagccgacaatagacgccgaaggcttcttgttccaggcccagcccagatctgcccagcaaccgatataacgtccaagtgtcaggacaccgtaccagaagaaaataccacccttgatgaagtgagcaaggccgttgaagatttcatggcccctcatgataccaccataagtcacagccccagtcgcaatacagacaaatccgaatggaagaatgacacggtcaacgatattatacacgacattcaaaacgcggagaactcggccggggatcagaccagggacagtcttggacaagaaacgaccaacaccggtgtgacgaatccagccttgcggagcggtatccttcggtagttcgtcgggcttttcaaatccgtcgtaatcggtaggcgactcgcaacacgatccagggctatgaatagaagacgagttgctatcggttccctgaccactatcgcgagaccagcgatgctcgcgcatcgcaccgttgaagcaagcatgctcgttatcattatcgtccgtcgcgacaggcagaaacgcagcgtgttcataagagggcgtattcgacttattcgactcgccgcggccagcgtaggcaaagagcaaagccaggacgacctgggtggatacagcacacgtcgcaacccagccgagcttgtggtgcgcattgttctcgtagaggtctggggtctggctgttatagataaccccaagtaggacaccgaacgcgttgaaggccaggaagaggaattgtgatagaatcgcaagccgtgagcgtgcgatgctcagcatgacagctatttgagatcagtttctgttttctttcatgctcagagctcaacaacagctacttaccgacaggaagaacaaagcaccatcctagaaccataagggcaatgtgagcaataatggtgctggagtgcttgctatacgcaaaatagctcatgggaccatcggtgttagcttgcatggcggtgggtgtaggttgcggcgcgtcggtgctcgtgttcatatgcattcccatgtccattgattcatcgtccccgtgtggaagcgcggtcgcaagcgatgcgagtagtagcgtgaaaattgccgccctggcgactcgagtggctaaaggccacatcaggaagatgatgtgatatactgcgagaaataataatgtggctgtatgtgcaaaaaatgcaagtggccgcgaagtataaggctccaaccagctgaggtcgaagctctatggaatcgtgacgtagcgagcctgtcaagccggtagctgggcccgtatttattcttgctttttactcctccaagtctagacaggactactcggagagtgacgaactagactgtccaattatctgtagttgaaaatgaagctgtagggctgaagtatgcgacaccaggagggaatgcagtatataagtccaggcgagctaggaatgaagtaccgggaaacttgctaataaagctaaatagaattttttaaaaaaaatagaaaataatagaaatgagctcgccggtgccgatttccaatgctcttgaaaaaaaaaaatatggaaaaaaaagtgcgtggagaaaaggattgacgccctcacggcatgcccaactcggtagatctcatttctgcttgtagcatgatgcatatgtaggtatcctatgctttatttaaagtctaagtgtcacgaactacgttgaactatggaaattgacgccaaagttgttgatatatcgtttatgaatcgaattttcttagctcttcctgtcattcgggtgtctcgggagcgtctaagaaatgtggattttggtgacttcatgagtttgggagcctggaactatgacctatgactacatagagccccaagatccgggatatttgcaatgggaattcttgtatggagtctggagggcgcagttctccgtctgtacagcatctgatgccttacgtgtggcacgatgtatacagaaatataggcgccttggccaatgacgtagtcgatcgttactctatttggaccgtgaccgacctgatcagctctgtatgcttccgttaggccttctatgtgtgtctaggcagacataggatgcatggaataggatgagcatagcatgtgcggagtatatatgcatgcttacaatatagcttcccacccatcatcaggttgactgactacgtgcaagtctaacgttggagatgatcaccagggatctatccccccaatcaacgatagcctacggggtacgatatgaaatccttgtcaggtgtttccatactccacccatctcggcctccctcgctttgtttcccgagccgcaattttgagctggcccgtccttgtagtgggggttatagtctgatcgtaaccgaatgtcgggctctatgctccgacatacgaaaacagagcaataagagcaaatttgagcggaagttcggcaccttgctttgttgcctaaagaggtgatattgaagtttgcgccaagtactgctactctgtactccatagtagctgcccttattcccgtgggccgtgaataaaccgaaattaagaccgaggggtggtccttgcatctctgatgcacagattttgtaaacatctcataacatagtggcatagtgggactccatgcgaaaaaaaaacaagccacgatgcatatcgtcatgtggtttcctaaccatcctggtccaagcttgcatattgtgcaactttaccataccaagcccccgctgtactccattctccatacttagtacaacactgcattctactctacttcatctactcagccaacgccacaaggatccgtcatctcccagtacagaaataagcgagtgggcgttgacaaaagtcgtgccaagaccgagccgaagcccgatcttggcgattggagaaccgtatccgtgagcatccgggtacatgagaaaaggctgggctgttacatccacgcacctgcacgtccctaggatctgcgttgaacaattgctaatctgtgaaggtgagctcttatgcccggaacgcaaactccgctttacttccgagctccgagactcggtgtaagtacagatgtctccgactgacctcgtgttgctaatcaatacagagtacggagactaaccaactaactagtgcaggtcagccgtaagctgtgatatgactcatgctttgtacatggcataaccttaagccgctaccctagacgtctgatttccaatctcgactaccgcccaacgccatggctttccacacccctcctctatggcggcagtacccggctataaccagacggtgtgacctgagatcaagccattcgacacgtccagaactcccaggaatattgcctggttgagaatacctaggcagtaataatcgggagtccggcacaaattctatccgcacccggcgctgacctagccgttccccaggggtaatggtaataatcggcgaccaatgagcagagtgtgaatacctcgagatcccgtatgatcaacacggatgtaggacttgggcacggacacgaatacgatggaatggttagggactaaaggccactcgcgctagttggaagtacaaaacgctaaaccgcctactacgtcagtagcttagtgctggggattagcgcattcgtgtgcctgtccgtagaccaatctaggtccgtggcctcgttgtgtagttaatttggctcatattaactaattctctgtagattaaaatctaatctatttggcttatgatagtagagggccgttatactattgggagtctttttttggagtcattttggggtatcttttagggtatctcagtgctatagctcgaaggatgattacatgacggtgacactttctctaaggcaactaccttcaactctcagtcatcgcgcgccttctgtagaatacctttcatccgatcatacaaccccatatcttcatttctccacctgcttccattagggaaaacagcctccctaagtgtattaacacatggaactagtggctgatagtactctgtgaagtactcattcgcggatctcacaaaatccgcttcatcggctatctcgcctttcttcaggccagctaaaatccctgtatccataaagttccacctgtcatagtttgcaacagttcttcccttgcctggcgcgtcataatggatgcatatccaaaagatcacccagaagaacgattcaaggtcatgcataaaagaacgcttctcgcccagaagagagccaattgccataaaggcccttgtgccggtctttccagttgctccagatacaccgtctcgttgttctctgatagctagatcaagatcaattaagaacgacggccacgaaggattctctttatcttcattgatcatgatattattgattgagatatctcggtgaaggatccctgcctgttgcaaggactgatgtcctgtaatgcaaccctccaatgcagcaagcagggacgaatgagtgctagccttgtaaattagtttaccatagtcgcgcaggacgacacgccgatgcactcggtttagcagtaggttgctggatgcattggtattagataccttggcagcagatgccttggtaggagatgccgaacatgatcgtttattaggtggtagaaagaggccactttgactagaagagcgcttcacactggacctgcctgtattatcaatctatcgagaatgagacgctcggtccggccgttctgctctatcttgataaatcgctggccgtctttcgaggtaatcgtagggtcaaacctacattcctcctcgctcatccataggaaaccgagaatagtggacacgaactggagcctatcctcattgatatcaaaccgttcggatgcgactcccccgagacggtcaaatgcccatatccttataaaggatccacatatagtaaagcctaggacaaatcggcgtgtatcttgggccgtaagaacttccctagtatatctccctaaatcaagccatggcttagaagctgtgtcagctgccagattgctttttagctctctaggaacgatgacctgtgaccaatgacattgggtatcctttctagcggtagtatcacttataaagccgatgtctagcttacgctctactgtagaaccctttataggtatattgggctgtgcgagtggccttcgcaggtacgtcgacgcagaattgtagtctactgagaacgttgccagtttctcactcagatctgtaaaccaactcaagacatcctcctggtttatatcttttggccaatctttctacccgtcggcaaaaatcggattgctaccttcagtgcatctttcgaatatagcatcggatgctgcttgaagaccactgatatttccaaaaaattttgagcggaaatgcgggagccctacatagagacacccaagctctgacttgaggaccctgtcaacatcttggcagtattcagaggagttagcgaagctactcgttttttggagccagggggtttgttagagggaggaggcaatcgctcgagggggcggcgtagattccgttacggccacgtccacaagattccatatctcttcatctgttgaggtctccacaagagatgctttgaaaagtggtttgattcgatcaaggtcgaaatgacccgataggataagttgaagcagaccccgttgaagagttcctcccgacttggacagctgaagaccagcagcgggaagaccctcaaaggctgacacgagggcgaccgcgagagattgcataactgtatttaagttagccaaaataagattttgcgatgcagtgccgcaccctcctgtgtaagctgatcgacatcgtctccacagattgacttgaatctgttgcgaaagccatttaggccatccccaatagggttttcaatcatcacctgtgatcttttttgatcagacatggcatggtgctctttctgccaccaggttgactttgtggtgagagtaagagcggaataccacgtgatttagagagtggaacctaccccgatatagagcggttagacctggcacgtaacatatggcacaccatttaaagatattcacggagtagtaagtatctaaaacctatatattttaacaggggtgataaggacgctaaaaatttagtgtatagctgatatatctagaaaatgacacctaaatgacgtatattgtctaaatcaccgacgtattgttctgctattctccgaagtagctgaagattgagtgatctaaatttatactcggtgttatggctagaaggataacaattagctataaaaaagtgccaggaatatttgacggaatatctccaggagcgaagtataagtcatgtagaatgtctgcactatcacaatgaagtcattgcaaatactaactattccagttagtgtcctattgcataaatgattacctgccttgctagtgccgccgcatagagccttaaccgcatggggcgtcatctagatagatcgtctatctagccgcggcaccaaaacgggaccagtatatccgatctgtcgacacctacagccgctacgaagaattcgcgggctcaatgatcaatggtgcacctcgagaggctcacccagccaaacatcaaaagctacaccaaatccagggacaagaatagccgtgcgagagcacgcccaccggcatccagaccacgagcaagttgtacagcaagctggagcagagatgattcccagagaaaaattccgtcattgaaattgttaagaaaaaaccaggatgagggaaataacataaatcctcgtttttcaagacactccatgcaacaaccccaaatcctcccctcggagccaagatctggtttgattcgcaaccccgagacaccggacacacaagcccgatgtctattcctccattcacaaaaacatcaaagacgccatttttgagcccgtctgaaacattgctccacttgacgctaccgtagtcgagccgggtacgtagatggatttcgtggatgcgaacggttcgagaggggggagttggttttttttgctcgcttagcggtactgtaggttgagaagcttgtggttagtgttgtgcttttgcagtgtgcatgtgtggtggcagtgggggccgggaagattgtcgattatcgattggaatttcacgtcggagaatgtgattgtgtggtattcgaatgggatcggacgggattgtcgagagaggaattaaaacgaaccttggtgaaaccaatatcggtggacttctcacggaagcactgacggcagatgttcatctaaaacgatccgtattagccacacaagtccatgtcatgtcacatcttgcgatatgcaatatgctcgagggattgatatctccttacgccgtacttgcggatcagaccggcgcggtgggagcagacacggctgaaggcgcacaattattagcaagcccgttcgttttgtatcgatttttgattccatccaggattcctccaagtttcattctcggtgtcgactggatcgttcatcggggaattatagcagggtaaacacaccattcgcgggagcccttgccgtacctatcgagcggagagaaatcccatgttagcctcgtcgctctttttcgagatagtgcctagtgtgtgcgtggtgcggtttcgacttacttgcggggccggctgtaccaaacgctctcgtgagtcatcttgaggttttaaaggtgggacctgggagttgacggggttgttgacgggacgagggtcgctggcgttgggcgttaagaacagagacaggagttagggttggaatttgcgttgtgtgctgccccaatggggaatagggcacgggccaactcgcttgagttgcgctagctgtttttggtgtatcatgtgaccaatgggcgatcaccacatcttagcgcctcaggctgccagatcttatacttcacttttcaacattaatcttagctgacttttcttcaaagtgctattgatagatactttgactattattcgaaacttttcgagatacttgaattatgaagacaacgtgggctgctcttgtaaattcaatatactaggaattcataaggctatgtgcataaagccaccagtttgtactacagcgaaactgtattttcttttgaatctacgtacttcagaatgctggcatattaatagccgtaatatacagcaaaagtgacttccctgctcttgaaacagagcccttctgttgctttctctgtctgaagacctgtgggcatcttccccacaatcatggaacagttggcctagactagatatggtcaagaatgacctccacatgtcaattaggttatacgttttggaataaccaggataagtaggataatctcggggaagcaaatcagtgggtctatattgccatttagaagactgcagaaaaagtgtggtgattaacagaaagagatagcacataagcggctgcatattagcatagagagaagaatgtttgttcttgaggatgtgtgtaacctcgtgttgaggcacgtgtcctgtttgctagctatttaattagcctcagttgattccttcttctccttcttcttcttcttcttcttgccaacctggaagcttgtatattcctgaggtgaagtctcggcacttctacatccatatttcattctaatatattatatatataggttgatcttctttcctatcatccatcctcccattccaccccagctggtctcgatgaaaacttccaaccgacctcaacggcatgcaagttagccttgctgtttaaacgccgaagtcactcagaagcttggtgatctggttgactggttgactgggctattctcgagtgcattcacttcatgaaggaatcaaaagctgccgggtcttcccttcgacgtggccaggttatctagcctctggccatgttccgattatatattcccaggtggaaatgggaccctgccacttgtgcccatggccccatactgccctcccagacttgatctagcacttagctacatcggaaccatattctcctcatcaatcatgagtctgtcgatcaacccaccccttagctaccaggggtgaacgcgaaccttccgaaatgcaccaagcgagccaaagaaaagcaattcaatgtctatagaggccttttggcgatcatcgatttatatcggtccatggctaggatccctcatgccgtcctccaaggtccttccttcttgttctttcaaggtcctactcgtgtccccaaggtcctttcttcttgtcctttcaaggtcctgcttgtgccttcaaggtcctctgagtccgataaacgcgctcaactcatcacccagcacgataccacgctattcgacggcaggccttgttattcagccaaaactcaacacactttactgctcattggaaaccgcaagtccgtgcttcagagtccggaatccaagtgcttcgaaatcacgagccacaaattgaactcgacgatttcactctcaatttcaggggtcaaagatctcttacattgcgaatcattattttcagtgtgctgggatataatcagatcggagggcatatgttgatcagttcaggtcaagaaactcgaagactggtcttcatgcaaatcgcaacaaacccgagatgctgaaggtccatcacttttccggtccgcaaaacgacatggacatggaccatggaccctggtggtgtctatattttgaccatagctaagttgaggagatgttgatacccttcatccatacgatcatttaagtcaggttcgtggccagcagtatttctatcgcggccacgtggctcacttctggacgtcctcaaatatacgatcggcctcccttagagctctagagctcgacgtggccgttttacggctaccagataccgcagacgtttcccacctacgctgtcagctccgtcgggatttcactgggttacattataggacatcagtccttgcaacaggcaggggttcttcaccgagatgtctcaatcaatcatatcatgatcaatgaggatgaagagaatccatcgtgccctcgttcttaattggtcttgttttggtcatcagagagcaacgagatggtgtctcgggagtaactggaaagactgacacgagggccttcatggctgttggctcgcttctgggcgagaagcattcttttcattcttccgggtgttcgccacaatgcgattcagcggtggttggaatttctgagattggaccactccggctatggcacgttattgaccgtgaccgaatctctcagctgcccgtcgaccaggatatatatgtcgaatcagaccccctctgatatcatgcctgtgaattccggaaattgaagtccaagtctacagtaatacagcgtgatactagtatatgcgaaggaatcaagtggctatcgacgtatgagactgattaattgtgttgtaagcctaactgtgcacaaaggttctacttcttaaccttctcagcccgaagataacgggcgctgtaaaacaggagataggcgtcctggcggaggacttccgccacacctgcgatggtgactttattgtcatccatcaatacccactataaaggtaacccattagcacggacacagacgggacgagggtacagtggaacaaaccttgtcgtggtcaatacgagtgtatgcataataatgtccagagtccattgtcccttggtggacgatgaccgtagacaagtcgtagatgtaattcgacatgtcaacaggaaggttgtcctttttgaccgtgtatggcagcatgttcacagacaaagggaagtcgatatgaccattcattttttcggatgaattagaggagtgttcataacgctgtgggaaagtcagcataagatcttattccaagggagccagaactcaaacataccttcagctgcatgcaaagcataacggggagtttgcggattagcaggcgcttcgaagcccgctggggggtgttaccacacttttcgcagtggtaagcagcatcggcgtggaggtcttcggcggcagtgaagctatctaggcagccgaggagggttccagtagtggaagaagtagaccgaccgagcttgcgcttcttgtgttgaagctggacatcaagactcagatcggccatagggtcgtgggtgttagtggtttgaccgcatttgtggcacatgacgctgctgcgcagttcgccatagaacatctggtggaaaaagcactcgcatggcttatcgtagctatccacatgtccgggggtagatgagtgcagttcattgacaaggaattggaagtattcgtgggcgtcttgctggcgatatccgcgcatttcctgtaactagttagcaagttctgttgctcaactcggacctcgacgtaccttggatttctgccagccatgatgaagaagcacggctgcagagactgcatcgtttctctcggcgctgttaaactccatgaagacttcagctgttgcacaggcgagacagtccttgatcatgcatgtgtggacatcatggccacctcctaggaaataggcagtgagggtagggtcgtgcagcagggcctgcaagatagaagcttgatagcacgtttgacccatgttccagacaccacgagcgccgcggatggcgcatgggttcttgtaagcattgctcttgacgtagacctcggtggctgagtcttcggcccaaatggaccgcccatctaccatatattagtagatgtccgcgaataaaatattcttgaatcgcctaaatctcaccgagggtttcaaatttggcagaagggccacggagtctgtcgagggtgtggtcatagatgaaatcgacacacttctcacagaagacaaagcggttgcgagactcgatatctgccatgtataagtatgaaccaagttgaacagtaagaaaccattggcttacaaaatgcatgcccagtcgctgcagtatgctctgctcgtttggaactcaggcatacttctgtgcaactcaaacagtgatacttcggcttgagggaggccacagttcggaggccagtagttggaacagcaaccgtttctgtctttgaaaacggagctagcgatttgtacttcttgcagaactcctctctgaactggccagcagtcttctcgtccttggagagaatagctgcaagatgtactagcgggaggtcagatgggcacaaatgagtcacgacaattgccattcttaccacaaccatacgcagcttcagatagaagttggaccgaatcgagagtcgccatagtgagcgacatgagtatggttagacgggagagagaatgaaagagataaggtggaaaggagaaggttaggattgatcagaacacgacacaaagatatgcagtagaaacacgttaatagaagttccagacttctaccgacgtggagacaagaagaggaggttgaaagagaattcaagggagagaaaggctggttatagagagcaggtacagcctcaaggactcctgctgaatagggccagcattgcactgtataaacagacatcaacaatgtgatcaaacagagcgtaccagaacaatagaactcacgatagcaagtgaatagggacaatagtagacgaacagagggaagctatacagtccacaaagggttgcgtatgacctggttcgacgtcactaccaagttcgggataatacgaccctattcaacagcaatgaatgtaaatataaaagtctattatgcactgaatggggtcaagtttccctgaggatctcaaaagtagtggggaggttggtttgccatcgggcggtggtttttcgcctccgattgaccgataccgccggataagatcagatggcagaaggcagaagctgatcttggtctttttgtgtagggaagtatttagtgatttagtattcaagtacagagtatatagactgggttttaatgttgtacaacctccgggtgacatgatagttccattcaatggtcatttctaggtaatcataatgaatggcagatgcgccaacccactgcagtggaagctatagctaaaggtccagcccttggacgctaatagtcaaacatgcagcatgaataataaattgttcataatcaggtcattgcaggcattcaatatccgttaccgagtcccagtccctctgccccgaggcagtgcgctagcacgcccaccgcgcgcagtgcctcgtgtagtataccggctgcttgctgtaccacgagcagtgccacgcgacgttccccttaagcccgcagcatacttggacgtcggtctagaggaggaggtggtgctcgggggattctcgacaaaagttgtgtccgtagtcctgtagcgtgagaatcattagctcaagtgtcctcttgtagattggtcgcatcgccctctcgactcacataaaggtcatctcgccgtcatcaagcgctcgtgttcgttctgattccatctctggatggcctgttagcaaacccagtccagcgcacctaggtagttcccacagagagccctcgcaataccttttttctcttcttcatcctggttggcttttttgaacgagtccggaatcggagcctgtgtcgaatcagcaaccctctcgcgctcttaccactgccacaactgtcggcgacgggtctgcgaccatacctctgggaaatccacacagaatgcattcatattcaatccatagaggaaactggcaaaactctcactgaagcgcgtcaggctctcgtgcattagctgcaagtgcatgaagttggcctcgagatctgccatcgaatcggccagctcggcgaactgcggctccaaggcattgatggcaggttgtgtgtatcctgaatttccaatgctatttccatatccgtgtgcttctcgtagtgaagatcgcgagcttgggcgtagaggggttgtgggcctggatgagggtctcgggcgcgaggatgatcgaggtgcgtccatgtcttttgtatttgataatctgataggagtgctggcgagagatagtaggccaacaataaataactgggggttgttattgttaagagtgggttgttgtcagagcgatgtcggtgggttgtgtttgggattgttgatctccccggaaggaaatgtctcgcacgcgacaacttttatacttgcaatttggagatgaggactgtatttgtacaatgtagatgtattacatggacttgaacataagaatccatgcctctaattgattcctcgttctaccctacattacctataaggaaatgatcttccccgcatcgtcatattgttgattccgctcggcgctcttacaatttcttccctcccatctcccagtgctaagacctagtgctcactcataccaccataacacctcgatcatactgcttatgcgtggcacaatcctacgtcgtctctatccttcggccaagttccctgtcgcccggtattcattcgcgcgaccattttctacgcacccagaaccaagaaaggcttcatctttctggacccttacatttactctcgctgttgtcggaggaggcgcttggctccaggacagatacttcaatcccaaagacacaatcactccgcagccccagctgtctcaagaacccttcctcggagtaatcgatacgctcgcgacgatgcccgcccaactcgcccccggaacagttgggaacctcactccggagcaggaagtgaagctgcaagaattctgggtcctggcactcaaagtcttcggcctcacattcgaagaactcgaagcccccgtgtctgccgcccccagtgaagccccaacacccgccccagtccaggataagaagaagtccaagggccggtggggaatttggagccgcggcgacgacgatgagacgaaaagcgctcccagcagcggcgccggtaccagcatagcttcaatcagtctcgccgacggcgacgacaagtacggccagtccaaggagttcaagcaagcgctggaggacatgaagcccgaggagatccggacagcgttttggaacatggtgaagggcgacaacccggattcgctgctacttcggttcctgcgggcacgcaagtgggacatcaagaaggcgcttgttatgttgatttctacgatgcgctggcgactgctggaaatgcatgtcgacgacgatatcatgttcaacggcgaggcattggctttgaagatgtcgcagggctccgatcccattgagaagaagaagggtgaggacttcctgacgcagatacgtctcggtaagagtttcctgcacggtgttgaccggactggtcggccgatctgtgttgtccgcgtgcgcttgcatcgggctggtgatcaggagaatgaaggattggagcgctttactgtttatactatcgagactgcgcgtttgttgcttgcgccgccgatcgagactgcggtaagtattccggtgtgcggattttctctcgggagctgactcttcagactattatctttgatatgacggactttggtatggccaacatggtaagctttcgtctctacgtgcttgacactatactgatatctccaggactacgccccggtcaagttcatgatcaagtgcttcgaagccaactaccccgagtctctcggagcagtgctcatccacaaggccccttggatcttctcaagttcgtatcctagcaccatatataaaacccctttctaaccaaaccaggcatctggggcgttatcaagggctggctcgacccagtcgtcgcagcgaagattcacttcacgaagaaccgtcaggatctcgaacaatacatccacccaagccagatcttgaaagagctcgaaggcgacgaagactgggaatataaatacgtcgaggtgccggagaacgagaatcccaagatggccgacaaggaaacgcgagataccctggtggccgagcgccaaaagctcgccaaggagatccaggatgtcaccgttgagtggatcagcaccagcttcaaaaagaagaccgacgctgcctctgctgccaaggagaagcggaatagcttgatcgagcagctgcgtgcgcaatactgggttcttgacccgtatgtccgggctcgctcgctctatgacagactcaatatcgtccagggcggtgggaagattaacttctatcctggcttggagaagggagcagagacatcggcataagctacgcagtacatgagtcgcggtacatgagtcgcagtacatgagttagatagtgtcatgcttacctgctaactatagagttttgatttgcatgtgtgtagtatacacagacttggcttttgttaactagaggatatatgaacatttggtatacattcaacagcagagccctgggtaaatccaaccgggtcctacttcagaggccctacaactcttccttcagaagaacctatgtagttcacagcgatctaaatcagaggcgatccaaatagagataactcagtttcattgttcttgaattcattgtcaccaaaaccaaagccgtttacatcttcgactggatctcctcgtgaagagccttgagcttggccatatccgtctcctgtgtaggccaaccaatggacataccctccttctcgttaggcttgggaatctattatattgtcagtgtatattcaaaggcgatttctagcgtaggaccaaaaattcgaaagatagtagagcataccatgtggaagtggacctatgagagacgactggttagcacggcacaattattagaggaatccccaactgaaactcacatggtcaacgacctggtgcgcaatgcggccattgttctgcaggatattgaaatcctcggcgccgctggccttggcaatcttcttcgcgacgggctgtgggcgtacatcttggttagctatccctgttctccaatccaattccgggtctctagggaccttgcggggttgcccccaaggtccccgaagatatgtaatcgaatccgatcggaccgaagacatagactctcctcttcaccctcttcgttgtcctgggttgttctctcgacttaccaagatctcgagtaggtcctcgtcagggatatcggtcaactttgcgccgtggaacttgggaatgacaagctgcacatgctgtcagtttggacttttcttcttctcgaattatcgtgcttgaatcgctggagctatcatggcagttttggcaacttcgctccccgccataatgaacacgccggatgcggggaagaggggtaggaagtaatacgcaccgcatggccacggctcagcggctggatatcgaggaaagcgaagactttctcgctctcaaagagcttaaatgaagggatatcacctgtatagccccaaggaagcaggtcagtcaacgcatattctgctatgacgtgtcgactggacattgcgatagagtacggagtagctatagtgtgaaatggacatacccttgatgatcttgcagaatatacaggcagcggacgacattttgtaaagctttaaaattggaaggtcttgaatgatctcgaagtgaagctatgttgtaagcgttcaatttagaaaaaaaaaaaaagaatatgcggggttgcggaatgaatcgaccgacgaggatcgaactccgaccgttcccgtgtccagaccacagccaaacttagcaatgagggtattataaactaagtccacgaagcagattcgaggagtgggacaagttagtgcagaacccatttcttgccttttaccagagatggccgtgatttgcccacaaaactcctcttataaatctttggaaacacaatgacacagctgtcattttttttcttttgcttttgcttttgcttttgctttttaattatttccagcatacgtagaaaactttgatttgtatgtaactgggaaatactgctgtgcatactccgtaacgtcggtccgtgtagatagtgtatagggttgtatccttaagcagctattgacgacatgtatgttgttgctatgcagttatctatgttgtatagcttccattcctcctagttgcaatgctgtaaactgttatttctatgggttcgacttgatatctctagtttgtcctatatactccgtacaatgaatggcttctagagctaccttggcaggatatacatccttgaacagccctagttacttatacgtactagtgaataatgtccgaacatggatttaacatgaatagtagatagctaacaagagccaacccactagctataatttcattgtatatagaaaagtatccatggatacaacatcgattcttatagatatgaataaagcatggggaacatccaatcacagtccaggtgttgtcagaccaaaacggggattttctcctatagaggtcgtagatatactaactcatagctttcagtaaagataccaacttcaaatcaaatgaacaaccagaagctatcataccagccaagcccaagaataaaaaagaaagacgacaaggtgatttgttaaagtggtggtccgtactcccgaatcaggactagcgcaatagtcccgtgcggttcttcccacttgacgctgcgaaagaccgcacatcaccacgccctttggcaacactccgctccaattcgctggtctcgagagatatacccagccagagaccatgcagaagtctcgcactatcaacactgccctgggcgcccggccttttgtgccagttccgcgggtgcagccccagttccagcgcaaccttcaggatgtccgcatcacccggactggcaagcccgttataaaggtccaaggtggccggtaagcgatcaatgaagctgtggttaactctaatgtcctgcttactgacgcgctcttctataggtcttccattggaggtagctaagccgttccaattcgatgctacgctcgatcccgatgtgctcacgcaattctaggtcacaccgcgacggtctttggtgctactggtttcctcggtcgctacattgtcaacaagcttggtaggttgaggtctgatgcactgcaattggaccgtagactaatagtccgcagctcgccagggatgtaccgttgtcattccctaccgcgaggagatggcaaagcgacacttgaaggtcactggtgatcttggcagagttgtgttcatggtatggagccgtattacgcatatttgttgaatgtggagtgtctgaccctgtataggaatacgacctgcgcaacacacagtccattgaggagagtgttcgtcactccgatgttgtctacaaccttgtcggtcgccaatatcccaccaagtgagttatgtgtggtatacatgaatgaatactttctgacgacccaggaacttctcatacgaggatgtccacgtcgatggtgtcgagcgtattgccgatgctgttgccaagtacgatgtcgaccgtttcatccacgtttcctcctacaacgctcgccgtgactcgccttccgagttctttgccaccaaggtcagcatatccactggaatacaagagcgagagtgctgataatgtatagggatggggtgaggagattgtccgcaagatctaccccgagaccacaatcgtgcgacctgcaccaatgttcggtttcgaggacaacctgctccacagactggccaagatgggcaatgtcttgaccgccaaccacatgaacgagcgctactggcctgtccacgtaagttattctcccggctggacaagctattgaactaaccctctaggccattgatgtcggttccgctttggaggctatgctgcatgatgacagcaccgccggccaaaccttcgagttgtacggccccaagaactactccaccgccgaaatcgcccagttggtcgaccgtgaaatcatcaagaagcgccgtcacatcaacgtccccaaggctctcctcaagcccttcgcgcactacgccaacaagttcctgtggtggcacaccctgtccgccgacgaggtggagcgcgagttcattgaccaggtgattgacccgaccgccaagaccttcaaggacctcggtatgaacgagaccgccgatctggccaacttgaccttccactacctgcaggcctaccgtagtgcctcttactacgatctgcctccttctacggagcgtgagcgccgggaggacaagcggtacgtgcatgtgctggacgaccagtagtttgtgtttttaatgtgtaaataagccttcctagacccaagttgatttcctttgttggatgagtgcatagtacaagtagactcgtagagaagcttaagtagagatgatcactcgccaatatcaaaaacccaattccccagaactccccgcacccgcacccgataacatcatattctacctccaaaccttacctacgtcttaccttcttcaccttcagcctcatactcatactcactccaaaccaaacccacaatgcctccaacacccatcctcctcctaaaaacaaaatcctccccccaagatggctacgaagagttcttctccgcacaaaactacaccccaaccttcatcccagtcctagaacatcgcttccacaaagacaacctcagccaagtccgcgaccgattcaccagcggcgaattccacaccgaagccccaacccctcgaaaatatggcggtctaatcttcaccagccagcgcgcagtagagggattcgcgcagatgatcgaagacgaacaagacggtacataccacacacaacccaatccaaccagactccaacacactaacaccaacaaatccagtccaattcaacaccccatcttccccactaaccctctacaccgtcggtccagccacagcgcgcaccctcacaaccctccgcgacaaacacctcccacacgccagcatccacggtgccgaaaccggaacgggcgagaacctcgcgcgcttcatcctcgagcactacgacgccctgcacccgacgcacaagccctcgctcctattcctggtcggcgaagtgcgcagggatatcatcccgaagacgctgatggatgaggcgttgccggtgcagaagcgcgttggggttgaggaggttgttgtgtatgagacgggcgtgatggggtcttttgagggggatttcgcggatgtggtgcgcaggtcggcggatggggcggtttgggtggttgttttttcgccgacggggtgtgaggctatgcttagggttcttgggttggggccttttgctgggaatggaacggggaatgggaatggacaggtgtttgttgctactattgggccgacgacgcgggatcatctgcgtaaggagtttgggtttgaggcgcatgtttgtgcgccgaggcctagtcctgagggggtgcttgaggggattgagaagtttatgagtgggatttgagggatggggatctgtataactatgtattctgtgtataactagatgtaaaatggaactataagtatataaacttgggaataggactagcagagatacagcaggtagcgttacggagtcagctattttacttaaatactcataatcacatttcgagttgcctgctatctctaacatgtatcaaatcacgctgtcaagtcaaattgcgtgcagaatagaatccagtatcctccctcaacttaatatcatttggaaacagtcaagtcgatttaccgcatgatttcctcatagatcaagactgggagaggttagtaaatatggaagagaagaggaaccagagacaaataacttacgcttcaactgctccttactcagagcatccttgttcttgtcgaaatcgaagaatccatcaggaatgggcggtgcggtgggctcgtcttcgggatcatggtatggctcaagataggggtgcttcagggcttcctcaacggtgatacgcttagccgggttgaaagcgagcagcttctcgagcagatccagagccgtgtcgttgctcttggggaagagtgcgcggaaggggatcttcttcttaaaggggagggagcggatgtattcgcgggcgcggcgggatttaatgccgtagtaatcttccattgtgggtgtgccgaggacatccaggatgagggtcaactggtggtgatctaagtgtatgttagttctgttactcttgaagggaaagtggaatcgtacaatccttgccagggaagagaggctttccgcttagcatctcagccaatatgcagccgacactccacacgtcaatagccttggtgtattctttgaatgtcaacatgatctccggtgcgcggtaccaacgtgtggccacatattcagtcatgaatccagaattatcatcagtggaagcggccgagcgagccagaccgaagtcgcagactttcaggtcgcagttggcattgagcagaagatttgagggcttcaagtctcggtggaggacgttggctgagtgcattgccttaagcgcacgcagggtctggtagataaagtactggcagtgatcatctgagagatcttgtgtgcggataacccgatgcatgtctgtttccatcagctcctgcatgctgttagtgaaccatatttcatgcatgcacatctcagacagcttcaacgtacttgaatgagataaacttcattgaatccctcgtagttacggggccgttgaatatctaggatggagataatgttctcgtggttaaagtagcgcaacaacttcatctcgcgcagtgtacgcaagcagaacatagaatgatcgaatggcgtgatcttcttgatggcgactttctggccggagggcttatgaatggcagagctgtacgaggttagaagagcattgagaagaaatcacgtctacttaccagacgacaccgtaggcgccttcgccgataacatcttggatttcatattgatcggagacattgaaggagatcttccgggatcctcccacgggagggttctgctgacccatggcgagaatggtttctctaatagattcagccttggggtgattgtcagctttgaacatccttgggatccagtggaaaaaaggccgaacacagtccatggttaatgaatgagagccggggattgaaaacagtagatggggatggcgcacaagttggcgattcacagtccagggaatgaaaacaatagcagaggtcaatcgctcaaaggcaagcaactcgaccgcagtaacgcgagggaacaaacgcaacaaacgcaacgacaaagcagggaaaccgggatatgaagcttactttcgtttgcgctgtaatcgaattggtttgaaaaaccgtccaagctactgcctggattggatttcaagggtcggcgagactcaggggataaaggcgaggtgtagaagagaggaactcggtcgtacgaagctccgagcggggaagatgtgacaggtacggagtacagcgtctagacccacgagaccgggggggggggatacgaagagcacaggtgtaggtgtcaggtcggatcaggtatcaagctcagagtctaagaacgtggcatgtcagtgggattgacggtgatgatgctggagcgcatggagatgagccaagccgctcggaagcggggtcattctctcatgcgggatcacaacgggtctggactgcgactcaccttgggtcgccttttctctacgaaggcaaagggagatagagaagaaaggagagaaggatgaggataggtgaacctggagaaacagcgggccgtaggggaagtggtggggcagagagctttaaggcggctccggtagatgaaacaaagtggttcaggatcagaacacgggaattggggtcaattaagaaggaaaccgtgagagggagcccgggtgagcgacgatcccagagcgagcggagtgaagacgaggaggtcgaggaagagaagaagaagttggtctgtcgctgttttccccctggcgctttcgctgggttgatggccgtggaaccttggatcaccatcaaagtgtctccaccagtacctgggggtacttaatttatctacaagggacccatacattgacaagtatcccccatgtacatcccaccacagcgatcctcagatctccgccacggcgccaaagtctctcgcctgtcacgctcgttggccgctggacggcgctactgcaccggacgaaacttgtcacaatcaccttttcccgctccaccaacataggaggtgctggtttcatcctgattggagaatccaccactcctagtttcactagtcacaggggggtcctgttaattgggtctgagacactgaatctcaggtaaaacaagtatacggagtaggtcatgcgcatatggtgaggtcaatggactccgattgtaggccgtgtgattctcctcatcaggcctttcatgaggttacttatttgtttcagggcttacgcttgagcatggcgctaaaatatacactcaaaatagaaatgtggatgtggattctactaatggtctgatatatatagaccatcactatgttcgggtcaaagcttacttctagaaataaacttgcaagttggattgataacggtagcagcggcctaggtttaattggagtgaggagaacatgatagcttgcaacagaagacaatataaatatgggcctaatcatggttgatgctccatcagactgtagttactctacatacgatgggagatccaccatcgcctgctccagcgtctcaaaatcagcgaacgaaacattgtatcggagatgtcgcttgagcagttcatgggcgatgaaacgctccggcatgttcccctgtgcatccaggaaagagacccggggattggtattgctgattatctgcagctcgttcgcaagacgatggtgatttggacactgctctgcacctactaggaagatcgtgacatacacccaggacagaccaagaagatcgagctggaattcgttcatgtctggtgcttcaccgtcgaggacgataagcagtcgcagtatgggtgtttgtggaccggcttgccatccgtacataggatagtaaattgctgtccgagagtgcttttggaaatggagttccttggctctttgccagcctagcatcagtcgagtctcccctccaaatctaatgtttggccatatttgttcgaaattctggtggttgatgtggcccatgtagcgggcctgatccgcgaatgtgacgagctggtagcctcagctatcatggtcgtgattgatcattgcttgggaaaagcgacgtacgatggcctgggcaacatctatttattgaacttagtatctgatatagactggtcggagggtgatatcacctttgctcttgggctgcttagaggcggaataacctgtaatgagatgctcattatgattcgggcgaagcggtgcagagttcatagattcagagacctctaacaggatcatagtctcgtctagaggagctgccggctcccgtaagggtctgaaaggagtcataacctgcttcgagtaagtctcggagatggattgagccttgcagatatcatcgcgagagaagtattccgcaggtgttccaattgcggattccatcctatatcgagccatgttcatcgcagagatgacatcaggcttcatcttgtttccaacaatgccctctgtgttattcatgacccagtatagacgttcctcggcgagatctttgtatcctctccaaccgggagtgactcctctccacccaccaactgcgtcaatgctcaatctgagcgggttggacgtggatttcgcccaatcctctgggataggctcgaaatatcctgcgcggaggaggtggagatactgaattgggcatcgggctcgaagatcggcgatcttttgacttgtcccggctgtttcttggtacgctatcacgagctgtcgccattcttgatttggccacctgccttgctcctcctctaggatggccatgcgtagctctctggtgtgactagctgctttctctgccttctcctctggcgtcttcttggataacatcttcttcaaactgccaaatgccgatggcttggagctctctatggggggattttctgctggctgctgggtattaggagaagctgtggtgtcagcctcattcggcacagaggtctctgggtcttcgctatcccatatggtagatgctggctctttggaatcaatgacagcctgtgccgcagcattgagggttgcattcaactgtaccatcctttgaagatgctggctgtagccggacggagtaggtttcgccttgttgtaagtcccgggagttgtaaccggaaaaggcgagggcacacggctatatggatttttcatgatgagagccgacgaatgactatcatgataggctgattcacctggtcgagaaagaaagtgagaccacaacgcaacttatatcgtcaaattggcaaagctgacctggatagatgactgctttggaccatatttcctgaataggaaggcgggcagcctttctgtctttgtatttgtggacatcgcaattacaattataaaactgtgtggtatgctctggttcaatatccttattgaaaatgcgacaggcctgctggatgccgtgtagggcggccttcatatcttgctatcagagcagacaaatgttagcactttatcaagacgaaagtattctatatcgtacttcatctttagagcggacctcggcagcttcaataaatttattggtgtgatggtgtgcaagctctcttatcactgaacgtgcatacggtggggggcagttccgtatatcaacctcggcatctatagtaggcaaacttggagttatagcttcattttgagcctcataataccgactaatagcatcatcaatggtttccgcgccctggaatagatgtgttagtgtaggaaaaaaggaaagtgattgaatgtcttacctccaagaatctgagggccgtcccttcattagcctctggagcgatggaaatgaacttcgctatgtcatctctcgaaggtaacatggtgagaagtactgaaagaggtaaactaggggtgaaatgtcaaatggggggtcgccagataggaaagtgcagggatataatctcgttactaccccggtgcgttagtgcactagactactacccaagcatcactaaacctgaattgggggcgtgaatgggaccgagcactctcttttcaacaattagaccatttgattcgattggactggatcaatttgctaaaaaccatctgaggtgccatccctcccatggatattctcatgattgcttcgcttcgctccgcaataaaatagtggaaaaatgataccgttaattcttcatagatgcgatcagcgtctatcgcctgtcaactataactcagcgatctactagtactagataatccaaacatgcccgccgtgatagaaagccaaacgcaatcttcccaacgtaatggtacaggcgggagagctcgcgaaaacacgaatttcatggtcaaccgagaccggccggtcagctccacattactgcacgacctgcgagcaaatcgtcagtgctgaccgatactatggccagagcagagggctcaaaccttctcttgcaaggaacccatccactgatccaagctgacgctttggtcggcacggtcctccaccagcatcgtctgagcccagagacgcagaccgggttcaccatcttcgcgaacgacgtacaggtgaggcacgataatgctgcccacacccttggcccggtggtcccgactcttctcaaccacggcccgcacacgctggttgaactcgttctcgacgtcggggagggtttgcttgcccacccgcaactgcgacttgtcagggacgccaaagacatcctcgatgagctgcgaaacagcatcgcggccaacccagaggaactgggtctggccatcgtcgatgaggtacaggccgtaaggcacgaggcgagccgaagacaagttgacagcagggggtaagaggatttcgccggtctgtggatcaggcacacccgcattgtcgggcatgtcatggagtgagtacattctcgggtagatatattggatgaggagcggcaggggtaaggtcgagagaaggcagagagctgcggaccgcatgtccgtgggaatctgggcggatttgcgaagaccaagctaaatactcgattagtatagaacagctatcacaaccaaagataaaactcacgttcttgatcattgcaaggaataggacaggcaaggctcgcaagttggcagggaactggaggccaccgccgctaacgctaccacctgcgagctccttgcggtaggtctgcagaagctctacgatcttagcctgaagagcctcacgagcgggctcgagaccgctgctcaatgtgcgctcgacagccttgtggctgaagaatgtggcaatggcctgctggtcagccgaggcgaagacgtctgccaggttctgggtcgttggaagcgccagggtcaagacacggatacgacgttcaccgttgcaggtagtgtggaggacagccgcctgcatgcagacgaccggctttgtaactgtctcatcaatggccacctcgaccacgtaggcctggtcacgagggaaggccgggaaagcacagagatcggaactacggttaaagaagttgccgtaaaaggtgctcatacgcagaccggttgttgcgcgcacgcggaggacggcctccagaccaatctccgaagagaggtagtcagagaactcacgggcgaacttcatggcatcttcacttcgtgcagcgttccagccagggtagaagtaggtttgaccaccagtgtagcggggcaagcagctcaacgaggccacatcttggtattgcgatgagaagaggaacatatccacggagacttgtgattttgaacattcaactgcaaagctcttgtagaaagagtttgcggtttgaagcagactcgattccttgctggtgcccagcaccttcttgtcttctctcatagtgagcgctccgtgaccagtgttaggcaaagatgagctcagaacagtcatctttccaccaacgggggagatcaacatgtaaccagctcgcaatgccgcacccatggcgcagctgttgttttgggtgttctggaacatttcttgcagcttgcggaggaatatctcaatgttctcccggcattcgctcagcgtcaccaggagatcaccagggatgggaaggaaaggctcgtccagatcactgacaaccaacatccggggctccgaagactcggaatcgtctcgaggaatgctgaagtagtgcaagcttgagtccactgcaataaaaccgaggcgagtacgccgatctgcgttcgggatacgatcgaggctctcttggatggtgcgagcggtagtggccaaaagaccgttggtcaccgatgcataacttacatcgatcaagaagaggtaaaccagcggttgaggtggtcggaccatgtattcctgcggcgcaacgaattcgaccatgctgtggttgagatcggcacggagctcacggtcggcgggcttttgcagtgtagcatcccaatcgaaggcttgtggcacgtcgttcgtcaggttgcacatgttacaacgccagcggtggccatggtcgaggaaggtaacgaaggggttgatataagagcgacaacgtcggcatcgtgagatgacttggtctggaatcacagggatagggtcctcggcgtcgtgaagagaagcatacggttgaatgacaagggcgaagggcaactttgatttcttcaggagtgagttggttgtggggacagcgttgagcgtagatcgcatatatttcgtagggcaattggcttccgacgggtaaacactggtctgtcgattgtaagcatatcaaccatatgcgcaacatggcatctatacgtactcccgggggtaaaataattggaggagggggatagtccagctcagcgacgttgaaaggttgggatcgaagatccgtggggtaaagctggttgagctggacttgaggtcgcataggggcttgggccacgggctgcgggggcggcatgtgatgaggctcgctcatgcccattccgccgaattgctgggtcatctgcgagacatctgcggaaacaggtgcgccgtatgctgcgggctgcatcatgttggggtccgcaccgtaggcgggttgttgataccctacaacttggggctgtggaggataggccccgtaagcacccccagccgtgggttgtccacctagcgcggcattggcgccagaaccgaaatcaaatgcctcaccagcgtacgctctcttcttctttccgcctgcagctggtgcgggtgcgccttgcccatataccggggattgtgtgggttctggagtgccgtaggcgggctgggcatagccttcctgaggggggaatcccccttgtggtgctgccattagagtcgagtagattgtgtttagtcgcacttaacggttgggaggaaaagagggttgcgcttgtcacgaagtcggcgggtggaatcgatgtgaggagacgggtggtaacagctcctggaaccccacaatcagtttctcgtcaacggaacagggtgaacctggttgcgtacggggtagctgtacctttagaaagcccagaagtatcacaaaaggcagtagcgaggcaaaagacagctcaccagaagaaaccaagggagtgtgggagaggcggtgatgatggtctacggtggcctttaggtcgtggcgctccagccaatcagagttcagagaacatgtgacgagaggtgtttttatactgtacgacaacatttgatatcgagtacgagaccatttagatatcaatgctgggatatttgcatatgcagatatatatgtactatttactgtcgtcgagctgacctatatatgtttctaagtatctgggctggtcagactgaacacctaatccctggtccaagcgtagagcacatccacagattctcctgtactgtcaattatgataatgagactacgcgatttgcaagctgattactttgctaaatttgtaccggacaattagatatccccattgtggtgctcgagtcttaagaatgtactagtatgtaagatgtgttgtcgaaagaggcggttgccctgccaacactaaccacatcggctgctgcacacgagaactcctccacacgttccacaaccttcagttctgcatacaccgagtagttagttttgtttctttgtttttagggggaggaccttattgttcttgattattgtctttttttggctttacatttcgttctagccattccttcagtttgttttgattggattgcatcgcatccctgacgaccaggacccagaccatcacacgacaattgaatgaacaccccgccacaatgagtgtccgagttgtcgcgcgtatccgtccccttctcaagtccgaacgggaggccgatgtgatcgttcgtacaggatcttccgccatcaccgataaatcacgccagtcaatcaatggcgacaagagtgacaagagtgacaagaaattggcagcattgagggacagagataatgtggttcgaattccgaaccccaagaatgagggggaggagtatgcgttccagttcaatggcgtgtacggcgcagaggtatcgcagcaggagctgttcgatgctgagggtaagttcttgttttaagctcatctggtctgcgatgggtcagtatattgatccggttcacagtgtccccaacaattaagcatcttctcaacggattcgacgtgacccttttcgcatacggtgtcaccggaacaggcaaaacacacacaatgcggggcgggaaaacactggctgaccggggtgtaatcccgcggctgctcagtggaatctaccgacgtagccggaagattgaaaaggacagcgagggagagacgacagtccaggtcgccctgagttattatgaaatctacaatgacaaggtgtacgacttgtttgagccgcccgagaagcgcacaatgtcaggtcttcccctgcgagataatggtggcaagactgtggtttgcgggctgagcgagaagccgtgtaccactttgaaggagtttgagcagctttatgaccaggctaacactaaccgttccacctccgcgacaaaggtatgataccacgccgaaagctagggcccatattctctcgctaaacatacaacatagctcaacgcccattcatctcgatctcacgccgttctcggtgtgaaggtcaccatctcctctcctgacaaggttcgcgtcagcactgcttccgctattgatctcgcgggatccgaagacaatagacggacggaaaatgacaaagagcgcatggtggaatcggccagcatcaacaagagtcttttcgttctggcacagtgtgtcgaggctatcaacaagaagcagcaccgcatcccgtaccgcgagtccaagatgacaagaattttgtccttgggacagaacaatggattgacagtgatgattctcaaccttgcgcctgtccggtcttaccaccttgacacaattagctctctaaacgtcgccaatcgcacacggaagatcgaggtccgagaggtcgaaaatgatcccatgttcaagggtccggcccggccatctattcggccatctatgggtacgcggcaacctctacgtgcactgactgcttctgtgaatgtaaatatgccggcgcctgctgcgaaggacaccgcagaaaaggaagagggcaaacccgttaaggcattcagcgtatactcggacaagccccaacccaagcttatcagccagatccgaaaactggaagcaccgaaacgcacctcaatctccaatgccccctccggccttccgtcattgaagcccgcccgtcagcccctgggtgtgcaacccaccgcgcgtcatgatgacttctcggctgctaggattgaggagatggttgagaggaaggttgaggagatcttagctgtgcgggctgtgagcgaacaatcacggcagacgcaagtccatgagcttaatgagcagcttcaaaagcgattggagcagttggagcagcgcattgatggcacagaagatgcacgggctgagggtctgtcatacctgctgatggctaaacaacatcaggcacatggtgaagacgggtcagccctgagaatgtaccagctggcagctcctcacttccctcacaacgagaagctggcagccaagattgctgccttgcaggaacgggttcatgcaaaggcttgggaagagaaacccgattccccgcccaaggggaggctgggtagcatgctctcccttaagaaggacgtaacacaaaccctcggcaaacgccaagcagagactcatgaggatagctatatagaccagactcatgccggtttttcgagtggcgaggatgttcttcgccaaaaacataagaagcgtgctgcagccaagctcggccaggtcgaggaagcccccgaactccttgacagtgaggacccatccctctctccccgaactaagcatattctttccatcatcaactcgcgggacgtgagccggatcagattgctcaagggagtgggtgccaaaaaggcagaggctcttgttgattgcctctgcgagatggaccagcctacagtggatacaaccgacagcggagtcgtctcagaccagccccaattccaggtcaccagcctggcacaactgagccagctgaaaggcgttggggtcaagacggttcagaacatgagacaaggggtattggcttaattaattgttgcatcttttggcggcatataccggagcataacggtgtttctctcttcttttttttcatgcatcatcattcagcgacggtgctatggcgtttcctgtctatacttttgttgaatgttttgttctatcttctgaatccaccttaggtgctttagagacatcctcatcgcgttcttttgtcataaccctttcattatacttgatccaagatcctttccaatgtttccttggttgctgactagaagatatgaccacctcggtggacttatcttcaatacaatatcctctctaacattcctaatctttcatcctcgtggtcttggtataacccctcggtttaccccggcacactgcttcttaggacctgaccccaaactagcagccccatgagcaatccctcctatgacacgaacatagagcgacaacgcaacttgagtctgcccggggccgtgactccttgctcaagaccgtcccatatatccgaaggcccaaagccgacatacacggcgctgatagtgatgtggaggtactcagtgttctcgaggagtatgtcatatttcgttaactcttgtcctcaataaaggggagattatctattaaacatggagaattataaaagatcaaaacccgaaaaaaagtctagtctaataagacccaaaggccgcatagttataccttgttaagtttgaatccaccaacagcgcccctggcgaaaacaaagaaaaccgacccgacaatcatgacaacaccacagaatatctgtagcttggtataactgccatggagaacatccggcaccaaagcacctccaataggagtacctgtcaaggccgcaaacgagatgacagcaaagaaagtgccgttgcgcacgcccacttggcgaagatcggatatctgcgccacaagagccggtgcgagcgagacgaatgcaccagagccgaagccatatagagcgctgaacacaattgccggggcattgcctcttgacggtagccagagggccaggacgatgatggcggagaagaacgttgttatcaccatcatgttgtagcggccaactttgtcggcgtaatagcccgggagtgtgcggccgaggatactatttggattgtgttagttcatgaacgaggtgaagtgtatgaactagacagggagagaacttacctagcagcattcaaaatcggaatcagatacccggacagatcgccagacatgccatatcgctcggcctgggtaatcacaaaagtgaagggcaagaacatgccccagaagaagaaaaaggcaccagcaagcgtaagcgcgaacttgatctccgccaacggtctcaggaaaagcttgatatggaatggctttgggtgatgcggtaatctcgatttgagcgtgagattggcgatacccaacatgaacaaaatgaggaaggcgcagattctcatcgcccaggggaacccgactttgggaatcagttggctgaccatgatagggaagatgactccgcccagactcgatccagaggctgttacgccgagggcgaaaccacggcgcttagcgaaccaggtgctgacggagttgacggaggcgttgaagatggcgctcgcgccgattgggctgcagattccttgtgcgaggatgaattggtagtactctgttgagagggaagccatcatcaggccgaagacgtggaggaatgtaccgaggagaaggacccagcgcggaccgtagctgtcgaacatagttccgaagattgggccctaagaggatattaggatgggtcttcataaagctgactctgggggatgggatacgcacgcagaagaacatcatgaaggtctctagcgatgtgatccatgttactgtgctggtagagaactcgctcagttggtggctttgatagtatgtttggaagactccgatgcctggatgatatcagtatcccgttgggtccatgtattctgacagtacttacaattgatccagccgaagctgacgaatagtccacagaaagctcctaatacaaccagccatgcctgcgcacctccatctggtgggggaccgatcgccggtgcggagggtgctggaccagcagcgactgacttctcgacaggttgcgcttcttttttttccgatgggagtcctttctccgggtcattatttccatgcacactcacggcgggtgtggtggtggtactgtcgatagagggagccatcccagtctgcttgttggccatctttgttgacatagaggaagtttcgagtagactggaactgtaatctgctttgaggtattagatattgcattttgaaagaagacccccaatttatagaccccaaacgaagacgggaagtataaaattaagaaacaagattgtgcgttggacaagatcgattcgaaactcacctcaacgtcggcccaggcgtttggtctcaagcttcaggactcttgcagattacaatattccgagcttctggttccgtttcagtttcaaagatgctaagtcggccttcatttgggatatttaaaggagaaaagacctgcaaaaaaaaatgcaaagggacttcggtcaatcggtcaatcggtttctagctaagtccgagctgcttaattatgcttttcatactccgtactagtccagggaaagccctccagggaaaagcatcgttgcttcactgcgattggccaatatctcacagaacccggggtctggatcctcactggccctggaaggctgcagtggtcggacatgtctgcgatggcccgaagtccgaggcggatttagctagctcttcgggatattactcgtttgggcaatgaatgtcattcgagttcaaaacatatgaaacatatcattttggttagatgcagctgaaacagcataatctctgatattcattggctgttacagtcattttgaccaaaattgttcgaccttgtaccttttgtagggtctgtctgggaaaaggcgcacttttatatgtatgagtacgacgtcaaggtcaatgtaatagccagttagtagttatcactatggatcggattttggctattggatttggttgataggcatcgcatttgagagatacagcgccttccactctgaactatatagtttcgaaagtatgtacaaagtgagtccatactatagttactcaaagggagctgtgttgtacaacccccacccaacgtcacattataatattctacagctatcaatttctagtttcccaaattattgtcaccacgatggcccaagtcaacactctggctgtgagccttcaccaactggccaaaatgatcgaccactccctccttcacccaacagtgacagacggggacgtcatcgccggcctcagagttgccaaggaatacaatgtcgcgacagcttgtgtgaagccttaccatatccaactagccaagcaagagctccaagacacagacgtggagatatgtgctgtcatcggcttcccgcacggtaacagcaccacggaaatcaaggtgcaggaagccactgccgcagtcgaagccggtagtcatgagattgacatggtcgttaacatcggcaaagtcctcggtggtgactggggatatgtctcccaggaaatcgagcagatcaacaccgcagtcgtgcaaaagggcgctatcctcaaggtcattttcgaaaccgattacctcaagcctgagcatattgtacatctttgtaagatctgcaccgagtcaagtgttgcttttgtcaagacttctaccgggtacggcttcgtcaagcaggctgatggttcctacaactacaagggggcgactgtgaagcatctcaggttaatgcgtcagtattccggccccgatgttcaaattaaagctgctgggggtgtgaggactcttgatgatttgcttcatgtcatgagtcttggcgtgactcgaattggggctactgccactgttgcgatcatcgaggatgcaaagaaacgggggatcggtatggatcggatcgaagttgaattcaagccaatgaaggaggatagtcaccgatagtgaaaggtgaatattgaaccttttacttagcggtttatttccggcagaaaatatattacagacaccgtactaaaagcaaagtacccaagttcacctgaatggctccaatccaatgtacagatacaacatgcttacagtacacaatagagcggtgtcgaaagcggtcaaaaatagaggtactaactcaggtactcaggatcaatatcactcgggggttgaaccctggtagctacctaggtataccgcttcgtatgaagaatattccagcttcctgtccctcttcaatagccttatgtggcatctttctcatacgattttctggagccatgtcttattgcattctttctactcgaaggtagcgaggattcgtatgttgtatatcagaagcaagaaaaagagatttgtcggcaattgccaagataaaagaaatgcccatactgtacaggatgtaacgtgataatcatcccaaatggagaccgctctagccctagcccgtacaaaacccaatgcgaagagaactcctccaagtcgaccctttcaagcgagtctttctatttagtttgtgcgagaaacttcgtcgaatttgaccttcccatctttgcgaatctctgcaacgcttcggcgcgtcccttcgatgtcattctctagttcctggacagagcgcgtcaggccagggacattgctgacggccttttcggcttctgtcctttcgtctactggcttttcctctatttccttcccgctttcggtggaccgaggagcggatgtactaggggacaaggtgaagccactagggacattggcaatctcattaacttcctgcgcggacaaaacgtcgttgaggcgaggaccacgggattggatgaggacggttgtgggaccatcaaactgcaggaagagctagacgacattgttagttggcaaagaatgaaggaccaaaatggggtgccatactctatctccccagatggtcattcgagaccaagtacgcagcttgtggaaccactgcatagcaattttgtatgccttggaatcagacacgtcacgaacgaacttggcattctgtagaagtcttggtagcgtcttcagacccggaacctggaagttgagagtggtggatttgaaacggtaggggcgaggaggattggaggccatggtgtaagcgaccacattgctgtcgatcagatattagcgacgtcagtgcaatcgcggcgagggtcatacctgggatgcgcaatgtattgctctccatccttcaattcgacagagtatagctgtccgtttccgaccaacgctattaaacctctgccggtcacctcggagctaccccaatgagacaagctctgcgcaaattagcttgatgtttccccacggaatcgtagttccactcactaggtttgcgttgatagtaggcttgatggtcagagaccggcccgtccatgcaagcaaagcccgtctttgggcaaccatccagtcaacggaaccattgacgttgacaacggcgaatgaggtattgggcgatcgaacggagacaagagctgtgacaggacttggcgaggagatctaggaaactgtcaatcgctgtcttcaaatccgcatctgcatcgcgcatcttaccttctgataaagaaatggcactccgacgatagccctccggaagggttctagaacgctcaatgtggaaatcacctgcgcggattatgcgttagtatcaccattccttcgtgacaacatcatgacgggatcgtgtacattatccgcctttccgctcaatccaaccagcgttcctcgtcgtgtgtataggttctgcgaggccgagagcgaaaccgaaagaagcgagtatggagcgccgacaacatcgaagcgcgcatctatgtgccctcatggtcagtgccataataatatgtcccggggcaattgcaattacctcgtgattcaacagagctgggcgtgctagcgagtggcagattatcgccactaaccgaaggcactcccgagggcgcggcgcgaatctgaacgcatcgcgtttgccggtgaacgcgaggaacgactcgagtccaggatagagggcgaacaccttggagggggcgcatggtgtttgaaaaaagagcaaagactaccgaagggagaatttacgtcagttgtgacgaaagggaaatcgggaaatcgtgggcccgagagccatgcggcctacgaagtacacaactgcccctctgaattgcgacatttggaagctttattataagaagtctttgaattaccctcattctccctttacatcttacttctgcttgactatttgcgaccatcccggagtcgaatcgagagcgacggtttttactccgaagccggcgatttccccccacgagctatccggagacatagctaccttgcgcgccaatctttcttacttattccgaagctcctctcggtggtctgaactactcaggagcttagagaatattattcctagcggccatgctgctcagagccgcacgatcgccgtgctggcgcacagcacaattcacctatccgagcttcgccggcaagccacgaagcacacgactcaatggaacacacctgcgcgcattcacatcaaataagagttcattatggagtcaatccacagacacagacaagaaagatcacgcatctgtcaaagctactcctacctctactcccgcctcatcacaactagcagacgccaatatcatccagaagccggaaggtagcggcaatgcgaagaccccaccgaagaaggacttgctgagcgagccaatggctggaaagaaagaacaaagaaaggctgactgggctattatgaaagaaatggccaagtatctgtggccaaaggtaagcctcgagtgcaattggtatggagtaacagggtattaactatagctggtaggatgattggggcacgaagctccgtgtcggcacagcactttcactgcttattggtgcaaaggcaagtttcgtctgttattgtgttttcgttaaaatatgcttatatgaatccaatagatcctcaatgtggaaatccccttctacttcaagaacattgtcgactccatgaatatagactttgctaccatcggtggaactgcctataccgtggctgggtcaatgattattgcatgtaaggataacagcatatcgaagagagacttgtcgctaatatgtcttagacggtgtgacccgaatcggagctacattgtttcaagagctccgtaatgcggtctttgctagcgttgcgcaaaaggcaattcggaaggtggcgtcaaatgtttttgaacatctgttgcgactggatctcaacttccacctgtctcggcagaccggaggtctgactcgtgcaattgaccgcggtactaagggcatcagcttcctccttacctccatggttttccacgtagtaccaacagcacttgagatttcccttgtctgcggtatcttggtatgatttggaacctatatttacgtttctatcttactaacgcgttgtagacttatcaatatggcctccaatttgctgcgatcacaacaacaacaatgatagcttatacggtgttcaccatcactacaaccgcgtggcgaacaaaattccggagacaagccaatgcggctgataaccgcggagcaaccgttgctgtggactcgctcatcaactatgaggccgttaagtacttcaataacgagaaattcgaagtggcacgatacgacaaagccctgaagaagtatgaagatgcatcaatcaaggtgactacatctctggcattcctcaactctggtcaaaacatgatcttctcctctgcgctggccgcaatgatgtacctggcttgcaatggagttgcgaacggaaccatgaccgtcggtgacctagtcatggtcaaccagctggtcttccagctctcagtccccctcaacttcttggggtctgtctatcgtgagctgcgccagtccctgctggacatggagacgcttttcaacctgcagaaggtgaacgtcaccatcaaggaacggcccaacgccaagccgctgcagctgacgcagggcggccagatccgctttgagaacgtcacgtttggctaccacccagagcgaccgattctgaagaatgccaccttcactatccccgcaggacagaagtttgccattgtcggccctagcggctgcggcaagtctacgatcttacgtctgcttttccgtttctatgacgtccagtccggtcgtatcttgattgacggccaagatatccgcgatgtgaccgtcgacagccttcgcaaggcaattggagtggtaccgcaggacacacctctgttcaatgacactatcgcccataacatccgctatggacggattgatgcgtcggacgaagaagtgcgccgagctgcggaacgagcccacatccacaagcttattgagggtctgcctgatggctaccaaactgcggttggtgagcgtggtatgatgatctccggaggtgagaagcagcggctagcaatttctcggttgatcctgaaggacccgaaactcttcttcttcgatgaggcagtaagtgatcattccttggtcccacttgattgagataactaatcaccctctctatagacatccgccctagatacctacacggagcaggcgctcctccagaatatcaacagcattctcaaagagaagagccgcacaagcgtgtttgtggctcatcgcctacgcactatctccgacagtgaccagattttggtcttgaaggaaggtcatgtggcagagatgggctcacaccgcgagttgctcgagcatgacggcacctatgcagagctttggaatagtaagtcctcttttctttgctgttaatactccttactaactcaatttcagcccaggaacagacaatggctcatgatgggagcctggagcagagtcaggttgaggatgttcagcccaaggcgtgagatcccatccaacaagtgttaggctactattaagccgtactgaaaagcttgcagcacatagcatccgatgtaaacagcatcatgcatgtcttcggtgatagataacaataggattatgcacaaaagataacgtggactagttcctcatctatagatttcatgattcgctaccctcacggaacatacaccataggtgctgatccatccttgggctggtgcttgccttgagcaacacgcctattatgaacgacataaataacaatctgcgctgcagcactggcgattcctacagacaccataatgatcatggtacgtaggcccgtcgaataacttgagattgatatcagcaactgtccagtaattaccttcggagaataccttaacttacaatggtttgtctcctgcttggaaatactgtgtcccaaccattaacccgcttatcgcagacataacccacatcctgcagtcaactctcatcagctctagtcaagtcaaaataggaatataggaaaaacgcacgcgatgctgatactccgctcccttggatctcgacagttgatctgaacccaaaagttatgtatgggatgatatcccacagcgaaactgttcacagcagtccatagtccccaacgcgaccatttaccgacatggggctggaccttgaaatttactatcaacacaatcagatagcaggcttgagcagctatcacagttgcacctctgaggttggtccggtcacttatgtaggcgaagaagaatacaactccaagtgatagggacgcgccgactgcagctagcgcgtttgctgctgtcctgtcaaatccgagtgacctgtataaatgagcttcagatccatccatctacaacggcagtgaatactcacatgatgatggacggcgtgtaggtggttagaggactccatgtcgaaaacacgacgaatgtagagatgaagtgcggccagcgacggtagcaacacacagtacgaaagacaactttcaatggaatgcgcacgccatacgcgccctcggtacttccgccattgtcgtattcgagtcttttttgaagaatctccttctcggaatctgtgaatttgataatccccgggctcaacaatggccgggtgagatcgggtgatccaggtagaaatagtaataggaggaatgagacagatatagtgaacaacccctcgactgttgatatgttagcgaatgaagtcttgtatttagaagatgcatacttaggaagagccaccgccatcctcgaatgccgtgtcgaccatcaagaagcagaatgccagaggctaggatagggcttagagcgttgccgccaaacatcccaaagaagaaaatcgcaactctcttagctaattctcttttcgtataccacgacgacaaagtatagactgcaccgggaatatatcctgcctcagcgaaccctagaagcagccgtatagccaagaaagatcctcgattgtggacaaatacttgcatggtagcaagtaagccgaagagaaagacctgggccgaaatccacttgcgaggaccaatctgccaaagttactattagaagcaggccttccagggaactggtactgtacatactcgttgcaaggccatattacatggtatctcaaacaccacgatacccataaacatgagctgatttcccaaattaattgtggactgtgaaacgttgatatcagcggcgaagccaccagtcaatgcgctcgcaatattcatgcggtctagctggaaaacaagaagaccgagaaaaagcagaggcagcaccgacatatcgatccttagagaagttcatgtcagcgtctaatcctgatacttcatctatggggtgtcattggtggttactttctgcgagctttttgctcatggctgggttcccattctggtaagggcagcgataatgaagtagagtgctcagaggcgctatccttgagatctagcttctcatcgttcattttgacatccatattatatcatttccctccgttagacgtggatggtagaagagacctaacgacaggcaaggtagagataaccgaggatgaatattgcaagtattagctataaattatagacatccctgcaagatattacctcctctgccatatcataatttataatatggcgtgctacggtaaattccctaaatgaggcgtaccagaccttcaaactactataaaaccacaatttttctctctgggcgccgcgctttaatatcaacgggatttgaagggatttgaagacaaaccgcccaagtgaagccatgtggattttcttccttcgtaactggttggctcgacgccgtagccccgcgacgccaaattgcgtgacaaggcccagaatcgacgacagcagcgaaccctagatcggtgctaaaattccccagatcggcatttgcgacgggatctcgcctattgtatctatatatcgcaatctaacctcgggatgaatttatagctgtcttagtcctcaatctctatcatggtgcctgttaaacgcgttgcggtaatcggcgcggggccggcaggagctattgcgatagatgctctggcgcaggagaagacctttgacattatccgtgtatttgagcgtcgcgaaggtcctggaggctgttggtccgtttatcttctccggagcttattcgcgacgactgacaagaaaccccaggattggcgattcatcccagcctccaacgctccgcgacttcgcatctctggcgacgagaacagctgatcctccactacctatcccccaaagtttgcctgcgcagactctaaaatcggatcagcctcgctttactgagtcgtctgtttacccctacctggaaaccaatatcgactttctgcctatgcagttcgcccaggaacctttcccagaagagcgcagcgagctctccatatctcaccacggacccgaaaccccattccggaaatgggatgtggtccggaaatacgttcggagtcttgtcgagcgccggggttacagcgattgggtctcatacaacaccacggtcgaacgggtcgagaaggtggggacagagtggaaagtaacactccgaaaagatggagagaagagtgattactggtgggttgagtggtttgatgcggtagtcgtggcgagtggccacttctgggtcccctatatacccccaatagaaggcctggaggcatttgagaagaccagaccgggcagcgtacttcacagcaagcacttccgtgggagagataagtttgctggcaaggcaagctaacttcctcacaacaaaatttcaaggttttagggtcatcatgctaacgtaatgtcagcgagttgtggttgtcggcgcatctgtctcagcagccgatatcgcagttgatcttgttgaaacggcaaaggaaccagtccacgcaatcacaattggccatgctgccaacgggtactttggcgatgaggcatttaaccaccccaagatacaaaagcacccttcaatagaacgagtctcgaacaggactgtgcacttgacgaatggcaactgcatcacggatgttgaccacacaatcttcggcacaggctatagctggacgctgccattcctcccagcagttccagtccgcaataatcgggttccagatttgtaccaacacgttgtttggcaaaaagacccgacattattgtttgtcggcgccgtcgcggctggtctgacgttcaaggtctttgaatggcaagctgttctagccgcacggttgctggctggccgggctaccctaccgtctgttgaagtgatgcaaaaatgggaagcggatcgtgtaaaagctcggggtgatggcgtgaagtttacattgatcttcccggacttcgaagactactttgagacggtgagacatctagccggcgagggggaggagggcaagggacgaaagctgcccaaatttcgtcgcgaatgggtgcgggcattttttgaaggacatgaacgccgcaaggccatgtggaagcggttgaacctgaaatctcgagcagctttgatgaataccgagactacacacaaggaagtagctcggctttgagtttaactgtatgtagttatgcctgcatacacggaccataccctgaccttgacacggcagcatggtcatatgaatgtggctgcttacctttagactgtatgctatcagtttattagcctacttctggccaacgactataacatcaatgaaccaaatacttagaacacaccttcattacttatgtcagttcatagcctgtgttgttttttatagatctaatgacctatgaatatactccctacgagtactaattcattcgctaccaactatgcacgtagtctcatcaattattcggcttgcccgggtgtttggagaagaaagctcgtaaaagttctatcatgagaccttgtgcactatcaaagccctgcgtacctctcttagttatccactgcatcccgcgtaccggcattcacccgcgtgcacagggtataaaaggcctcttgtccccagaaatcttcttcttcttttcttttctcctcatcccccttcccccttctagttccgacttcaactaacgtttctgcagatattccttacactgcatcactgggcttacactacccccggctgatgcgaaccccctctgactgataggtagatctgacgttaccgcatatcttcctagtcttattttttgatctagcgacttggcctctgtgcttgcatatgcctcgttgcactgtatcactgggcttacaccacctccagttgatgcgacaggtagatctttctattacttgtaatctttggacccagcgacttggcctctatattgcatatgcctcgttgcactgtatcactgggcttacactacccccggttgatgcgacctttctcctttttttcatcaattattcggcttgcctgggtgcttggagaagaaagctcgtaaaattcccaccatgaagtcgcctctcttaccaagcgtacctgcgtgcacccgcgtatagggtaggtataaaaggcctcttgtccccagaaatcttcttcttcttttcttctctccccatcccccttcccccttccagttccgacttccactgacgtttctgcaggtcttcctaattctttgacctggcgacttggcctctgtgcttgcacatgcctcgttgcactgtatcactgggcttacactacccccggttgatgcgacaggtagatctttctattacttataatctttggacttagcgacttagcctctatattgcatatgcctcgttgcactgtgtcgctgggcttacactacccccggttgatgcgacccttccccttttttcatcaattattcagcttgcctgggtgcttggagaagaaagtttccttgattctatagtcctatcttatcctagcctttcagctttctcaatctcatgagtccacttgcattatttgaattcaatattcccaggtcgcctgcatatatttacgaaataggaaagagactggatgatttcaaagtttgacatatacctagagccttaagccaagtgttaaagtccatcattatctaaactacctaggcactgcttatggtatataatccattgacacggtgaggaattgtgtaaaacctctcctttctcagggctttgtccctttggcatcattgttaatcatcacttcttgttcttctcatatattgtacctctgcgcatcatataattgacggataagatatgttcgactgtgatagactacccaatagaccccatttatgcctagtgctccgggatcactctcatttttgttatgcgggcaagggaggtaagatttgattgtctatagacaaacagaaagtcgctaaatagctattttgcagccggccgaactaggcaaaccaggcaaggccggtgattgtctcaaattctttcatctcccaaaattctcttcatctagacacttctactctcccatctatcttaatcatctttcaccaagctttgttatcattggaacatagtgcaatatggaactcggacgttatatcttccagttaccctcggacgaggaactccaggtcttggagcagaagatcaactattctttttccaaccgaactctgctccgggaggcactccaacccgcgacctgggttaacgaagatggcaataagaaacttgcaatggtgggcaattcaattatgcgcctggtaattgtgaatcacggcctcaaagaaaagaagacgcgtggtatgtgtttctctcacactggctactctttcacaaacttacgatttcggctctggttaggtcaaatctccgatatgttcacccttaaggctagcaaatcctctctttgtgcgcagggcttctatctcggcatttccaaatttgtcgtcaaaagacctacccaattagtcgttggaccgactatcatggcgaccaccatggaggcaatcgtcggggcagtctaccttgactgcaatgagcagatccagccgtgtgccgttgtcatgaatgcattggatattgcttggtctgagtaaacaccaatcaccctacagtgacatacagtacccctgatatgggggctggcgagattgaccacagcctgtatgagtgtttgattcaacggtggggttgcttgcaatgacttgcatgctgcagcactatccaatgagtcttttccatacttttaatcgattccgattgatcctgaggggctctgtacattcccgtggcttggaattggctcctacaaaaacatactgagagatattgtggagaggacgagaaaggatatggttcggagctaagagaattgaatagctgttgcactgattctggtaactattatcttcgtctcgtcgtatgtcctcatggacatcagctgaatgcttgaagcacaggtagcgtcgtagcgatgtagagccgatactgtactcaaaactgcattttggacccttcttaagatattgactgactccagctttgctgtgctcaagattctacagactaactacgtcacgcgattgaaacttactaatcatcttgggcgccagatttagttgactaggcgatcccatgaaggcgatatggcggatatcccaagtaggcctattgccgccatgggtgacttatttacggagtactgttggctaatactgccttgccgctgattactctttcgctgatacggttggtctatcgtggaagtgttgttctccaatgagaaggatgtctagactcggcgatgatacgagtgccacagtgaccggggtatctgaccaaagcgtgccttaaattgacaccattgggggggccttgttgactaagataggggtgattgatacatccgatctccgttgataccaaaaaagcgagtgcgacgaattagaagccaatatttggatactccaccatatgatcaatagcatcgaaccttggagtaaacaacggtgtagcgagcgcacggagttctccttgttttttcttttccaacatttcgttttcagctatcctaacatcgcgccgtactgcgaatccaagttgtctaatttttcacggggtcttctcccactaccttcattatgacactacaggtcaaaatttgggccgactttgcccatgtatccgaggaatctgactcagaaaccaatgaatttcaatacaaaatgttcgctgtcatcaactcggacgatgccatctactacggcgaactacctacccgcaaagccgagacctcgtttcagcaagtcatggccaggccatgctcaagcctacccccgacagcgagatattaccagagtcgccactatctggcgacaaacccttgactcaggcgccactggatctccccgccaatgttcaagtcttcatcaagcgacccaacatgtcccaatatgatgtgtattaacgacaaaatgtagtacacctgctcgcccaaagctttttggaggaggcccgtaccatggaagttcttgccgtacacctacatccttatttcgtccatactacggctgccgcttccggggaggctatataaccggaatcgtgctcggccgccattcgcacgacctgaagaattatctcagtggcggagtgagaaatatcgataagaaagcattcatgaatgtgcttgagtctgctatctatcacttacattcactcggtttggcacacaatgacctcaacccaacgaatgtgctagtcgacgactccgaggccagtggtggaatgccagtcctgattgactttggctcggccgggaaaatcggcagcttgttgggaacatcccgcggcacaagtggttggattgagggtcggattgaggactatggcatttcgaggaaggaacatgatacctttgccctagagaaaatgcgactccggttggacaacccgactttcgacgatgattaatggggaaaatagtgatatgtagagcctatccgccacatggcaaaaagcaagagactggcattgtcacaagtctgttgacaataccattactaccctgtagcaatatcagtcatggaactgccactagattgagataccctgtattacagtagagatccattacgtcttaccctttgggattattggatcgaaattacaatgtcgctagacagagttcatcgaacaatgaatatgcattgtttgtaattattaagagggaggtcgatcaaaaaccggggaaaaggcaggcaagaagaagcctctttcctcacctttgccctcaccctcatttctctttgtgattatttgcttaggtatactcgttttcttaccccgagccaattatcaaaaagagaaatgacggtgatggcaaaggtgaggaaagagcctcatttaccggaggggcgacaagctcttatttgattttcggagttgtcaaaggcttcttacatgctttttccccggtttttgattgacctccctcctaataatcacaaatagtgcatattcatcgaaaataaaagagaagttgaaatcaatacagattggaattggcaccagttgtatatgcttggtgaaggcggtgataaatggcggtcagggatatgcccgtacccgaggcccagcagagctccaaccaatgaagatgaagcaggagagtcaatggagatcctttgaggcttcagccttagagcccggtctttattttctttcgaaaacacaacatgaccagcccaattgcgtatatttctccaccttcagctgagccacgcatcttgcttgttcgatcctatgccatacgagcgtctaccacgctagctttacggagtacttcagctttagaaattcaagcccccagcgcgccatatcggagtacgtggaataagatacggtattatctgtcagcggtctagacccgaacttgaatactgatctagaaaagaaaagaaaagtcttcggctagagctacaacaactaagcacagggaatttacacaagactcgaatcttcgcatctcgcatacgtgcatcaaaataaattgcccaagactaggattgctgctttaccgaacatatccaggcagccccattagaaacggcacataatctcccgggactacatcgccagctccccagtccaagatagcgaccattaactgcgtgataggtcccaaccatatggcagcgctctgacgcggctttcgatctcaagatcacgtcatagtatggctggcgaactttccgctggacaacgtagagggtctttccgggtctcagtctcggacaccgcaacggttccagcagagctagccaatcggaatggcccagttcatcgccaaacaagataccagccccctttcctcccctgatcggtttcaggaggtagtcgttttggaacgaatccgagactttgcaattctcgataaattggttgaatcccgtcgagcccgggagaattgtgtgcgccaagccttggttaaggccttcggcctgtttaggagtgatgatgttcctggagactaaattgttgagttcttcaagaacaagtcctagcatcctcttgtcgtgagcaagaaggatagttcgcatgtcgttgaagcatcgcaggctgatctgtcgtttcatctccggatcgagagcattgatctcccgctggtggagttcaaggccaatttggtgaatctcttccactatttcgccggactcgattgtgattgtctcaacagcatctgcttcagcgagacagcatagcttgtatccgtttcccccggagttggagggatctggaatgagtcggagagtgtccggagttatgagtcgcagttttaatccatgtcttttctgagcaaattcgataaacatcccgatatcaatcccgtgctcttcgcctttgataaggtgcaaaggaatctcgttgtcgaacagttccaacaatccaccgaagacctttgagttaaccattagcaatctgtcttagcccagatatcaaatctccactcgcttaccgtttcagcttccacggcgttagtcagacctcgcgatccaagattgaatgccgaaagcgaatcttgcccaaagacagtatgcatgtacccattccagcagaacctcgcgttgatctcacagatgcgaaaaacctccccgccagcttcatctttctctaccaaaaagtctggtctccaagatccttgtcgttcgctccacggtgcgaacaggtgtcggtttgagtccatccactattgtaacaaccactcagtaagccaaaccgagccgtagaagggatgtagcttacgcgcagtaactcttcctcctcctgctccaacggcacacggagaggaaaccgggcttcatcatccgtccaccatcgctcgataatatcctcgatggccaatctcagagcgaggtgcaaatttctcatgttatcatcgtgccgttgggtagttaacacagggaaaggacacgatgcatccagagatccggctggccaagaagaggagcagtcgctcaacttcgagatataactgtggcggcttttgcccaagaggtctacatctagcccttctgctgtcactggtgagtagtcgacggcatcgtcatcgggaaagctgatcagatggagaggtttcattttgtatgtggatattttgtgttgataatggaaagacgggatgatatatgtccttcatgtttgaatcgaactattcaactagtggttatcccgagctgaggtggagaaagccagatctagtacggagtacttcgtagacgatccctattttctgatgttctctgtatgtatgtatgtaatgtgatgtattcgtgtacagtggggcctctcgggtatatgtgggtccaatggttcacccgagggatccgctataatgtggggccatacaggcagattttgactcgtattgacttgcaattacaggtttgagatcgtatgtacgactatacatataatacagcattgaaacattcatgagcttccaaatggtgcggcatcccatcggacacgccgaagatgtcggttggggtctttgacttcattgcgcgaatgcagccatcggcgattatccatcaggataattgatccttggggaagacactggggtgtgaggtggagagtctcatcccgggcgccaccaccgtacagaatttccttcagttcatccagtgccttggtagcattcggagtcaagggaaccgtgatatcttcccgaaaccgcaattgactgccagacttcccgtcaggattcacggcgagcaaattagccacgatatgctgcttcccctcggttttgataaactcaggagggactgtaattttgtagttgtggctggagagccatttttgcgcgaaaggcgaaagcaaggtaaggagtcgatcgacgttcagcacagacaacgtcccgccgccgcggcggtctggctgaaggacttggagggcgaagaatctgggtggttgctcttcatagctgcagtcggtgtgccattcaaatcggaacattgtctctgatcgggcttggtggccatggctttggaaactcgctggggagggccgaacatcccagaaccaaccgcgctcggcgctgtgtgttattgggaggccgtggttgtggtttttgtggagattcgatatcagactctgcagatatgtgctgttctcgtcgctaaaccctagatgtacttggagcacacctttcgcttcgagggtatcgtatacggctctcaagtgggaggcgtcggaggcgagtgctggcttgggaatttcgattagggggacgagattggaggttcgtaaatctcctgttatagtgagtatgagaagaagaaaataacagacgatacatactgatagggcgggtagaataacttgccgtcagtctggctgtagaaacagcacggaagagttgatgcattttgtgcaaccaccatgtaagatatggaagagcagtcggcgctcaattacatatataccaacagctccaaatgcaacgaagaagaacaatatcacgaatatatgcagcataccctgtgcggaggacagagtagaggagcaatatatttcgactggtcatatagggaatgagacacatatgtagtgtaatgctgtatgattggcatgcagattactgcgtacagcgtatggtacaaattatcagattaattgcaactcctatagatgcggctgagctgacccactcgggaaacacggagagcgcaatgaatgtgtcgtacgtacaaagagagacgaataagaatagaaataagaaaataaaaatagaacacctgaaatgggatctcatcccatgtaacttaacttgtcagggcttagttcaggacatcgacatttaaactagacgagcctatacggcgttggacacttctctccaacttccaacaacctcgccaacatgactgtcattaccgaaaagaccttaccaataggctacaattggcgttcctccaagtggttcattctctctaccatcgcaatcgcgttgtttgctggtctgtctgcccctagaataattgaaacaacacaacactaatatcgagtagaaacattcctttatggcttcctagttcccatcctcggagaaatgcttcgggaccgcctccatgtcccgccatctcaagctcaggagttaacctctgccgctcttgccctacatggtactctcgccatggtctccggccctataatcggtcatttcgccgacaagaatacaggccgcaagaccgcactactattatctctcggatggtgcattgtcggcacgtgcatggttgccggcgctcattcagtccctatactactgctcggccgcgtgttgcaaggcatcgcagggtctgctgtgtggattgtcggcttcgcaacagtcgcagacactgtcagtccgagccgcataggtttcgcaatgagcttaatgatgtcctgcgcaaacaccggagtaatcagcgggcccgcgattgccgggctgctgatagaggccaccgggtactggataacatggtcgatcccgctcgtggtcctgacgatcgattttatcgcacgcgtgtgtatgatcgagagtccgtctagtcctccctctatgccaaccgagactgcgagtctgctttcctcttgcgaagagcagcaaattccatcccgaaacgatagtttctggcggacaatgctatgcaacggccgtgttgggacctgtctgctgattataatctcgggtacaaccgtgagcacgagtttccacgcgacgcttcccctccacgttgaagagacattcggatggggtcctcgtgccgtcggattcctttttgccggccttgttattccgggtgtcgtgatcggtcccattgctggctgggtccgtgataaagtcggaacacgacgacctaccatggtctgtgccgttcttgaggcaatagtacttggcctaatgggtattgctggcgatattccttgggcgggtgctcgaaatatgggtaaaccgctttacgtcgcctgtatcgttgctataggcattttgcggccgtttgtgtctggcatcgcgccggtcgaactgacgggtaagtcgtctctctccggctatgaataagtgctaaaaatatctagccactgccaaagctatccaggaacagtccccagggacatttggacctaaaggaggcatgtcgcgcgtattctctatgatggatgttgctgattccctcgggatgatgattggtccaatcataggcggttcgctgaaggaaatggtcggctataaatgcatgagctggacttggagtaagtggtttgatcttagtataatcgggtaacttactaatgatagcaggtctcttatatctcctcctcgctgctcttgccatggtcttcttaggatcagaagatgctgaggaagaatagttcgggcgactgtgtactttgttcctgtttttcttttccatcggaatacggtgacctaattgggccatcggacccacatatacccgcgttccaagatttggcccgacagctcgggaatgaaaataccgcccacagatataatacggtattctcattggtaatttcaattaatacatgaaaacactgcaccgggtatggaaatagagtaaatacacgtaaactttttattactccctcgcgatcgtccggtggagacccgagatctgcaggcactactcagctgatcggccttcatgaggtcgtctccatgaactagtagctactccatcgtactccgtagctcagctactccatacaaagttcagctactccacgtcacaaattcaagttcattttggtttttctctgccttgtcttgatccatcaatatcaaattcaaatattcggagtcttctcaatcacaattaagcctatcgccccgactcaccctcccgcaatttcctaccttcaattgagattgctcgtagcagattctcgcaatggcaacggaaaggtattcattagcagaggtgctagccgtcgctaagacgcaccctttctacaacccggacactgtataccctgccgatgcagaaacaatccggaatcttcggaagacggtcactgaccaagaggcgaaggctaaattccaagagcagccacttcttgaaaagaaaacactgtaagacaatatcggacatccttctacagtagttagctaggctaatttagctcaggtacaaggccattgaacgactctcacatgatgtggacccgcgcaacacctaccgacaaagttcctacgtgagcattactggcggtggttctggcggggtgccgatgatgttcgccgtggatgtgcacgagaaccgtcgacagagagcgcaatttggggaatttctcaaattgtgcggtgtcattcagcctggagattgggtcctatccactcatgtagcgggagggttttacaggtactaagatccgaattgcacgagacggcgcgatatcctaactaagaacaaggtccctcgatctcacgacggaaatcacagaaaacgccggagccaccgttctcagcgccggaagctacatgtcacctacggatgttgctaaatccctagccgactatcacgtcaacatcctaaccggtgatggaagccaggtcgtccaagtcgtctaccacatctccctcatggcgccggaggatcgcaatcgcatcgccctcgacaaaatcatctacacctccgagcccttaaccggtccgcagcgagcgttcatcaaggcggttctgggcgacgtcaagataatttccctcatgggaagtgccgaggcaggcccctgggcaatcagcagccccgatctgaccggggagcagagcctgactaataatagcacggacttcgtcttcgacacgcgcaacatcctgatcgagatcgtctctccctctgccgtcgacggcgtatcttcgcctgatccaatcctgcttccagaaggagaacaaggtctcatcgtgcagacatctctccaacgactgcgaaacccgctggtacgctacatcactggtgatatcggcaccctacaccccctcccgagcgcagcctgtgctgtaatccccgaggcggatcgggactatatacgtgtgttgcgcatgcgcggccgcgataatcgcttcagcttcaattggttttcctcttatttcgaatttgagaagatcgatgccctcatgcgggcggacgactgtggcattctgcagtggcagctcattatggatcgattggagagtacgccgcaggcgacgctagagatccggctgctgaggtcgccgcctcgagacggtattttatcggatgatgctcttatcaaccgcttcaaggctttctttgttataggttcggataatgaggaactcttccgaatcgtgtttctggataatcttggaggattcgagcggagtgctactgcggcgaagattattaaatttgtgaatcgatgggattgaaccaaaagtattgtctcttctgttgaatgtagagatcaaatattgtttcttcatcctgcggactccgagctttaaatccggtaatccggcttatcggatcgcatccggacttcgatttaacttcttgttaaatccgtttatagttggccaacagtccaatcagaatcactgcttttccagtgtcacattctcgctttctctattgagatggccaggtcgacagtctacggtctaccttaactccggcatcgccatccctcaaatccatgatactcactttgtttaaatagataccccgacccttgattctatcaaatatcaaatccatcatttatttccaagatatcccatctacacattctccagagccatgtctctctctggaaaagtcgtcctcatcactggctcctccaaaggaatcggaaaggcaacagtcctccgccttgccagcgaaggagccagcgtaataatcaactacctctccgatgaagccgcagccaacaaccttgtcgcacagatcgggcccgaccgcgccttagctgtccaagcagatgcatccaatctgtccgatctcgatcgcctcgtggattccgcagtcgccaagttcgggaagattgacatcctcattccaaatgcaggaatcctcccaatgaaggacttggagaatacaaccgaagcggattttgacaacgcatacaatctcatggtgaagggcccatacttcctagcccaggtaagtactagattacattcttgtcctaaatcatagcatttaatgatactaaccgtgttctagaaagccacaaagcacatgccctccggtggcagggtcattttcatctctacagggatcactgctctttccagcgtcgcacccgcctatcttctctatgcgtccgctaaaggtgccatcaatcaaatggctcgtgtcatggccaaagacctggcacggaagaatattatcgtgaatgccgtcgcaccggggcctaccactaccgagctcttcttgaaggggaagtcagaacaggtcctcaatgcagtcgctgggtttagtccgtttggtcggattgggaaaccggaggagattgctaatgtcattgcctttttgtgtggagaggatagtagctggatgtcaggtcagattgtgcaggtcaatggcggaatggcgtagtccgaccgcggatatttgctgtcaacacgcactttacgttcgtcaatgcggccataggaactcgagcctgaggctggtaccagaacttgactctagatggaggctacttttgtcctatgttcgagagacttatatgtgcaatgagagaatcaatgaccgtgtcatttctgaaaaacacgtccatggcgtctaaagcctgtatgaaggagactgctaagtttagcgtcgatcactgacaaccataattcagtaccatttccccctcgtcaagaagtttttgcggttccggaagtaatggaagaggaaagatgcaaccagctgtttcatcgtgcgaacgactattttccgggtcagagattttgacaaagataaacaattctggtcggttctgacttacaaggagtacctttcattgttatacaatgccttgtagatcctctgctgttgttctttatcacgaccatagtcgaaaccgactgctttcagaagcatctcgctaaaacagtattcttgacagaatagactggcaaattccaacagtctcggataaaatcccgctgatgcccagtccaataaacagacacggccatcatctaaccagatgatgtttcggggggctatgtctaactgacagagcaccagtggggtaggatcaaaatgaaccttaccatccccgggaaaaagccggctattgaaccattcctccacttgctgaacattgctaatggtcagattatttgtatctggccagagtaagccaattgaagggccaccacacaggctaccagccctatcggcggtaatagagtgaaaatactcaagaatgtaggcgagtctctgaatgtgagagtctgaaagattatcgataatcttgccctgaataaaatccgatattatatagccccaaccctcatcgtccataaaaaatttatgaaccgaaggaactataatgatatctagattaattatgctgtatgctttttgctgattctttgcctcatgggaggagacaaaggggccaaacttgactaccaagtcacaatctggtagcttaacgacctggttaccagacctcaatcctccagtaagctgatcttctggacaagaccggcaatagtcaatgatcgactggttattgtctagttgaacagtcatggcagcatcagacattagaaggggggtagacggagtaagaatgggaaagaaaacaatggtacacatgatctaccgcctcggataatagatagtcccttagctagccatacctgaccaacttgaattcaaggaaatatggtaaatttgaatcaaaatcaaattctagcagatgcctggcctattagtcacataagagtcgtggttcataactagttaccggtgctgcaacagatggggggaggtggtatcattttcactccatttttacctgcctgcctgcctgccaccacaatgcctgctaatataataatgaacccagtcagcatggaataagggtagtcccttacaccgtgcggcgtggcggcggtaggggcagggccagggggattcatattgaaaacgccattagagatggcatcgaatatgcattcaaagatgagttggttaagttcatagacatattggcgggtatagtggtgggaagcagacaggcaggtaaaaacggagcgaaagatggacattggagtcacgaactgtctgaagttactttggacattgaattcttatttatagacgacacgaatcatgtgatttactagtaattagtaatatagggacccggccgggaggctttacatgaagtttaacctagcactacctgctgtcttttgtgaaacgttgtatttttatattttttgaaaggccgaaaggcctatggtgatgcgaccaaatctcttccttgactcttgctctagccatatctctcgagaggaaaccctctgctttatcatagaccgtctgatagctcgcgcttggggacgcattaattaggctaaagcccaagtccatccgccaagcccgcaactatctcatacaaagcccaagccccggggtctgggagttgctgacttgaggcatccccgacatacgttgctcggccgaacttggccttgagatgtcttgtttcctccgcctttttagcagccacatccactgctgacagaaaatcatttgttttcgaaaactcctcgctgaaagggagtaaaacgtccataacagtacggtctccttcccttgctcccgtgtgcgacttcagggttgtcgtcgcggacgccagagcagttgaatagaagtttggcgtattagggcagattccctcgagcgaattctttctcagggctgtataaagagcggaaagaagaactccaaaaattgcaccgagggttccacccatgtcgtcgacattctgcaacacagaccgaattacctctagcagatcgcctgaggctgtgcagcctttatcgacactttgcaggactgattcggccaagccttggactgcctcgccacagtctccatcgcccatgaccatgtcccactgggtcagccttggctctgctgcaatggctctttcgcacgaggtccttatggtcttctccaaaagtaaagggtcaaatttgatgcgaggggaagcggtaatttggctgtttacctcggcatcgagattatcgaaggcggtcttctgttgagaaggagagggacgggcggtgtttggccaagagacagcagtggtgggacaatcaaagtgccgtatcaaggtcgcgacagattgattcgattgccgagctgcggcggtaaggttgcagagagaaatcgaaaagcctggcgcgttgagagacgtttcaaatgaaccaaataatgttttgcaaggcctgatgttccatcgtgagcttaactgacattgaatctcatcggtcagagcagataactcgaggacagagaggccaccatagttgttgaccagtaaaccaatttcatcgcgtggctcaaacttgacaaatgctcgctctgtatcggaatcatcgcaaaggaatttgagacactgctcaataagttgctcgacagggggggcgggggaaacatgaagttggccgggctcattatgtataccggcgccgacgacaaccacattgtctgggacggatgattgttggtgtctgcctggaacatggcaatggtcaagagccgaggcgatcgtaaccgtctgtccatttactgcttgtcccagtgcaagacactgttcaaaggagtaaccctccgaggcagctgccccgatgatcttcattgctacggcgtatccatcagcagccatcaaaccagggaacaagtaacaatcttactaaaaatatgaccaggtagccctctcctacccatgtggctatttttacttcttccaatggagacatcatctgtagcatgtagaatggcaatattttcaaccagaccttcagccttagctctctcggccgcaaggccgaagtgaagacgatctccagtgtaattggttatgagtagtatagtccctttcttcgatggggccgtccgaatcgcagccaggatttgctttgcgcttggtgacgcaaagatatcaccgcacgcaacagctgatagcaggccatcaccaacatagccactccacgccggttcgtgtcctgagccgcctccgctgataatgctcacctttgagtcatcatgaaacgcattggaaactactctctctgtgtagttcaaactcaagtgatcgtttgcggagacaagagctcgcagcgctcttgggaccaaagaattggcgcttgttgaggggaagtagtgtttgtcggacatggtttgatgggtaaattattggtagggaaaggataaagcaatttacctctaaatacgtggttcgtaccatcttttaaagtgtccatcccgacttagtctctccatgtgactggcttcgccaagggttctccgagcttggtaattccgtgagtccaaatttgaagagagatcccggagtggagatagcggtgttcatattccgcacatgttccaccgtcgagtcgggaggcctaagttggtactgccgttggagtacatcacgagacgtcaaagtcctagcctaaaaaggaaatcccgcagaatattccgaaaatggctgatgaaactgaattcggcttttctcttcaccttcaaaatcattttcgaaaataagagattccttgatcatggaagttgatttagatttctcttacaagagttgtaacttgttgaaaaagtcatgttgtattaagtatcttttgtattgagttgatatacaaaagatacctaatggaactgtgctcgggatgtggggccgttcgatctagtagatccggtttgacgaaaagtccccgcctcgcggcccacaaagtttatcaatcaggtacggaggagatcgaggtctgtacctgcttcatcaaacaagtaggtgatcaccacaaatcctgggtttagctagaagcctagagctggtgcagtagaggcaaatgctgaaggatttcatttccttagattggatgaatggcaagtaaatgttacgtgataactaacttgatagactatgaaaagggtttattatgaatagaattactcctagactaatttacagtggtacagagtgtctaaccaggtaggtcgttcaagagatcaagacgcgttcaagttggcttgcacgagccaagcaagtcctagtaccaggattgaggtgactgggatagcaaggactcgtctagcagtgaaacaactctcattgatcttgctattcgcaagtctgatgctctgcggctttagagattcagcgaatctctcaatctatacacagttagcatatggctacagacctctgtcgaataggtattactaacctgttcgcatgcagtcttgatctccaagtaattgagatccttggcgtcattcttctgttgaattcggtggacaaaacgacaaaagaccttgcacaccccctgaagacctgcaccagattcgacgacaagtccaatcgcctccctcttggtgattttgatatttcgttcgaagagagccgggttgcggaaacataactccagtgtagccatcgccatagattggggaatagcacaaaatctgaacacgctctgctcgcgcaagccagcaagatacgacaaacaatcagtcgtatgtctcagagcatccaacaccatctcagagctgcagttaagggccagctcgtgattgtcgggtttgaacaggtcttcgaaattctcgacgtgtttggaccaaatctttttcggccaaaattgtcgaccgtcatcattatcttcacggatatcgcgaatgatattgttcttttgcagtaagaggcccatggacttttgcaggtgagactgattgatcacatttgcatccgccagatcagcttcgacaaataggcgggttaggccctcgccgaccaagccagctacataccagcaatagaggtcgtactcttcaatcgtattgacggctatatctccaacagccgccttttccacgaaatcggccatgccattccccattttatcagtggtatccttgatgatcgcttggtagacaggtttcatttgtcggaattcagcaaccacgttatcgaactgcactaatagctcgcgatccttttcttcggggcggttgccggtgaaggtccagccatcctggtccaggacatctttgaagtttcgaaggagcggcacttttgtctcgagggggattgaagtatcgtcttcgatggtatccagaccacgtagtatcaagtagaacacacaaacgggcaaacgtagctcgggatgcagttccttgacaacgggactgtagctgcgaccggtttgatccaggaagtcgaaacagattttggttgaagactcctgctgtttatttctctcgtggataggatggcgccgcagtttcctattaacggtcagtacccttcgaatgcagtgtttgtaaagatgttagagatggctatagacttaccattggattatcgtgcggagctggttcgggcgaagcacaaagtaaagaatatccgatatgagatccatagtagggagtgacagggtcttgttcggaaaactttttacagaaaatctagttaggggtcgattgttagttattgactcccaccaaaaacggcccggaaacggcccgctatcgccttcatcctttttgaagagaattatatgcaagaaacagacgtatctgtatctctccagtctccgaattgcaaatatcgatatcccctctgatcgccggtacttttgttccacgccatggcgtgtcttccggtaggcgtgcgttgacagttagtgggactggagcggcaaggccatcgtatgaattcggaaacaataccaaccagctgatcttcgtagtggtgaaaggtgttcgcagggaacaatctcgcggggcggcaaaagccagcaagagcgactggattcctgcctccagaatgattggatgaggtagagttgaagaacatagtccctcggcggctgtggtcgcgatggcagcgcaggaaatgtccaggtgctgctcagcagaaatcaaagctctaaaaagtccattatagctcagatatgactctgcgagtgaatcataaaattggtcaatattaacaggcctcagcctgcccggcctggtatttttgaacgaaggtaagatcaatcggtcgagtgaatctggcctgcaaagttcacgcgtaacaatattttggcgatagtgggtatgttgtgattcgcagctccgctgacttcaatattgaattctgtttcaacgccgtcgatgccttcaacatttggattgacaaggtcggcaacggacaatgagatatcaaactctaaggcgggtccttccagtattaccgattgctctagagtaacgtctgcgagctcgatgctgtttactttcttttcattacgcatatccatcgcaaccgcaagtgccgagacgcaaatgatagatgcagggacaacggattgaccttgtatgcggtaatttttaagccatagaaaatcttctaatttgaagacgtgccgccacctcggcttcattccaatggtacttggaacgcggcctccatgtagcccttgaggtagtcctgtcataatcaagttctccaacggcagtggaaaggatttgaatcgcctccgaagtgaacgatgaatgagaagtcaatcctcgctaattgagcaatatattggtacttaatcctggatcaccgtctctccagtaaccagcggcttttcatatgtctctgaagccgattcgatatgaacagttcataagtacgatgggcatcgggtccgacacatcgccccggtccacgtccgaagagacccagagctgacatcgtaaattagagtctaacaccgaaatagaaactttgccgaaactcggatctggccgaaggactccacagccgaaatctataaagactcgtaatgtactagtatttcagccctggaggctacgaccgagaagatgtgctgtttgagaaagaagaaaaaagacccggtgacaagaagtaagaatgaatgttctgattgccaggttatgaaacctttgatatatctttcgtacaagagtggcccttgagtccaccaaaaaagaaagaaaagaaaaatgacgaatacgtttagaagtcttctccgcgagaaatcacttctttaacgttaggccgaagtagaattgtctgagttccgtcagtgagatgttcctctccagaaaagaagaaggggggtgacttgcgtgttcgaactgggccgaataggtcccctgtttctcattcagaggggggtaatcttcgacaattcccgatttcactagattattcaactgtcttttatgtcagtcaatagttccaatccaatccaatgttttgaaggcaattccatacaccaaggagatacttctcttgtccaattctgtccaaatagcgccggcagaaagggatagtgctgaaatttttcttgatagcacccaatacatttcttgccgaggacagagttaaatccttcctttttgcgtcaccgcgtagagcataatgagagacttcacccccttcgacgcatcggccggcaccggtactaccaaatgtttcgatagcaaaaacatcgccttcttccatctttgtcatatcattggatttgacaaaagggacactcttagtcccatggattgagtaaggaaggattgtatggccgcacaagttacgaacggcctttatcggatgagtcttaccattgatttcacactcgtagctttccatagcctcttgtattaagccacccaattctccgactcgaacatcgataccggcttcccggacaccagtattagttgcatccttgacagctgctagtagattatcatagataggatcgaatgccattgtaaaggcactatccacaatccgaccgccaacgtggataccgatatcgaccttaagcacattgctttccttaagcactgtcttacagccagcgtttgggctataatgggcgacaatattgtcaatgttcagaccggtaggaaatcccataccagctattaaagagtcgccttcggtaaggccatcatgccctactaaacgtcgcgcactatcctcaatgccgttggcgatctctaggagtgtttgaccaggcttaatgcttctttgtgcccactgacggacctgacgatgtgcctcagctgcctggcgataatcggaaaggaaatcggaattcaggttgtccaggtatcgcttctcctcgctggtagttcggtatcgattgtcgtccttgtactcgacctcttctcccttggggtaggtgttgttcgggaacagctgggagatgggaatcgatggaggatcggtctgagtctttggctgttttttgggcttcttctttttgttcttcttcttcttggcagcgctagcatcaacggctactgccggttgatcttcaccgtcatctgagttctctccttcccccgatatccggtttgctgcggcgcggttggaaacaggcatgtcggctgcattcgcagcagcgccttagcaatgaaaatagatgtcagcatatgttcccgctgactcccatgtgtcgactgaaatatattcttaccctgcccgctgtttaccagcttctccgaaagttctggcgggtcggttgtcatgtttagcactgggaggggggaagttggaactccaaggatgggaaaaatgctctccaaatttatctgccccagaacaaagacaagagcgcctacaatctgtcgggtgaaatcaaagttacggtttttaatactgtctcatacactagccaggtgactgaaagaaaaaaattcattcactcaactccaccgtggattatctcaggaatcccactcttccgtacagtacagtcacgcctgtatttattgattaatatgaaatacagtgctcggttgttaaaagacaagaaaaatactcgtttaaaaagatcagcgagatctagcaggagggtatatttagaatgaactttagttgtagatcgatgaactagacttattctgactattttatcagctactcccagacttgagttatttgtgttgaagtgtttcataatgccaagtccatagcaacaacatagccgtcttaccatcccaccctgggagccagggtgggtctgtcccataggatagtatctggtagcgaatttgtcactaagctagaaggctcggggggatagtatattgataatcctaagagcttccccctgggctacttagtcccgtaatagaccgagaatcttctcaggatcaaagggataaataccacgagacctaaaagatgatctaatagtccgttaggtaaagccctgctatcggattttatcaacttgccattgattccaagacgaaagccatcaagaatgctgattcctatgcatggtttgctaccgctatgtatctcgatcaatgtgactggtctcgaatgatctgcgctcagagcaccagcacttcaactgtcactaggcgatcgaacaacgaaacaaccactgatatgcctgttatgcgaaagacaaattggcgtactctattcccccgtgtattggcaggattgcaaggtgatcggaagtaagcatgatttggtacctaggtatggtgatcactcgcaaagatgattcgaggcgctataagtcgatgttgaagctggagttcgttcacaaacttctcaggcgtacctgatgcagtgttataaaatgcgcgctggcttgatggatatgaagctttgttgatctgctcttaatatatctaccttcctacgagacgtttcctgggcttatttgatgtgcccgagtaatcttaaatcaagttaaaatgaggtcattcaagaggccatcggtcattttcagcacatttgaaggaaaactgtgaagcctgctctatcatttccttcctactacaggtcatcgcaatcaccttcgagatctgctatattatatggcgggcattctatcggttgagttggtagaggcactgacacatagttttccggtacatagtgaacaatctccacaaattcaatatgccgcgattcatatccaatcatcccaagatcttccagctggccaaagaaatatgacatgatatccagaggtgttctcccgcctagatcatacctcactttttctttatagattcgttctccttcctcgttaacaaatttgataaagtaaacaaaccgcctagcagtttgtccctggtactcacaagtaccctctttccacatcacaggaatttgagccttaagcgccgccgagggatactcaatagggtcctcaccatcgatatgccagcagggtaacacgctaaacttttcaagagaggaaatagtcgctggatccaagtctacagggaagtagattatcaggacctcataaagcataggaggagacatcgggtgggctgctatgatatgccccctatccgggagcaggcaggaaacttctcggctccatgagcgagttgcaagagcttcctctaatcggagataaagttccgatgtacaaaactcttccctgtctctgctgcttctccactctagtatttgattaatttttggacatttaaaagacgatatagcaagcatctttcaaaccaatagtgtaatactgcgtaccgataatcaaccactcaatattcctcagctcctgcggacggcctcgggcgataccggtacactcttggagtttttgtatctcttggaggacggcaaaaatttcatcgctattgggaatgacaccattgcgtgtatctttgagcgatatccattctagaattcgacggttttcgggcattttggctggaaatggatctttggagttttttcttcattttcttgggattatttctcccggtgcgtccgtttgatcgagtggtgacaggcataggaccttggaatgaaagatgtaaatgtcaaagtgcaaggtcggactcttcttgtacgtagtggatctggtcgatagtattgctgaaacataaaatgtacatatattgcgggtaatatgttaacagtgttgaaagtacggttgctctcacgttgccgtacctatttgatgaccgcaaattagaaggatctattgttatgaattcaatacgtaaagataggacgtggacctcgggatgttccggtccattaccccccactccgttatacgcctttgtaatttaaacgggagacgtttgctctccgacagtccgatttaataaggctctagacttaactggtacataacgaaatatcagccttggagccaagtatgctggtatccacaggccaaggccactaggcatgcacgcttggacaaatctgtatattgtacaagataatttgctaatgacctcggcagcacgtatgtacccgtagcggattctcttgatagcccccaaatgctgcgccttcggccgacaagaaaacaggactgtgatgggcgagatttatctccgacagaggagtgtttcgcctcgtgtatccgacaccccacgcaggatgtattcactagtaatccatgaagttggaaacgaacgccacaatgctacggaggtccccaccagcacaccaagtccaatgacatatcatttcctgtctcttgatgtagaataggcgggtaaaaagtacgaagggtttgaagaggggtctatttgacctatggccgagtaagcttcaaagttataaaaatgtagcagctatatccatcaccgaaaagcgttagcttcctaagtttcggttttaaatcgcttgtacctctcttcctttgttcgatcaggctcgtcccattagtaggagtccgtactgtattgggcagaaccggaatcacgccggagtcacatcattcgccgaacgtgaaatgaacatgcttgtgcacgatctagtgcttgcccatctagcctgcgatcgctaccatggccagaagttacattgcaggagagagagtaacagcagcacttgcgtgcgatgtgctcgggctggtgttcgatgtaccccacgacaaatgaggttttccaacccactggagacaattcgatatgctccggatctgtacaaatctcctctgggttctcacagcttcacaataaacacggcatgctccagcggccttgtgggagtcgatgtagcctgtaaaagtctacgggcagggacattggctggcgccatgggtggcaggtgtcaatttatggctttccccagaacatactaaagaaaggggcaatacgcgcgcggcatactcaataagcggcaaatctcacaccttcgatgcaaaggcagatggttactgccgggccgaggcagtcaacgctgtgtacctcaagcatctatcagatgcagtgagggaaggtgatcccattcgtgtattgttcgcggcacagcaagtaacagtgacggatgaactcctgggatcaacagtcccagctctgaggctatgtagtctctcgccattttcatgcgggttttccttcgactgtctaaaaggccttctcgaatccgaaaagccaggtgctggcgttgcccatggcagttaagagttgagagtaccatactcaaagatcactagatgtataccaaagcgtcaagtcacagacaaatgaaagaggttaagaaatatgatgtcattgaaaaccatcgaacctacgcgataactattcacagacgaacgatcccgggtatgatcacaaaacgaatccagctaagtacaagacacgaaaacaaagtctatgcaggagacaacctggaagttccagctcacacatgtaactatttcttggacgacttccgtgatccaatacccagccggcccaggttcggaagactagacttgtgcttgtgagcagatggtccagccttcgtactgctctccaatacacgtccgacagtggtgccaccggcgccatgaccagaacccagcgctgaatttccaatagtgacgttactggcacccgaagcattgcgcggagtatcggacagactggcacggtgtctggggcggtctgcggcagccacggagagagcggctgtaagagaggggttgctcatagggccggactggtcgaaggagtgacgggtggggcccagggctgctcgacgggctcgttcctggacggacttgaatttgtcgaggagttcgacccagcggatggagttctcgtcgcgggttttcaggcgggtgcctgtagcacggtcgaatgacggggccgtttgtgtggtgctaggaaagttcgtctcagtaaactttgaggtagaatgcgaagaacagcagccatacctgcggattccgccgtggaggaaaccaatattgctaacgctgttcagacgattcttgagggcggcgaaggcggagctctgcgggaggagcatgaggacgccgtagagacatttgtacaggaaggggtatttttcgggttcaaggagttggaggcggagatctgttggggttagtctctggactaatgttgggttgatggaaagaaacggacatgtgaatacaggtgactcgagtagttgcaccagtttgtcgatttggattagcatattaactgtcatttccaattcggcactgtgatggttccgtcagcggatatcgtggtggatggagctggtatactgacaagacttggaggagattgtatgcctgctcataggcctgggcaagaagacagagagaaaacgtagagacagcattgtggcaccaggatctgaaaagcccaacaaagaacatttgaccatcctaaatatttcattaatctcaagacgtaggacagggtgtctgggtgtattactctggaatcgagatttcttaagcgctttcttaaatccgcgagttcgggcgctgtgatgaggttgttgttcaagttctgaaccatgatactagcaaattcaagatcctgatgatacattagcatataggaccccaaaatgtgcaagaaacatcacctcttctttctcgaggcattctgccaaagtccgatagatacgctccgggctcaggttcagagaaagctgcctgatgatcagatttccacgtacttccagtagatgtctgtcagtggagtagagctgcaacaggttgaccatgaaagaggtaaaatagctatcctcgctgtttcttgagatctgggaaaggagctgcagatctttggttacaactgcctctgaagggtcggatagtgtctttagcaaagctgggaaggtaccatcattgaaagcgacaaccttccgcggggctttacggtggagcataatgagccatacaagggccgcaactctagtggcttcattttcattgaggaattggagagtgagggagttgacggcagcggcgtaatcaaggtcgacgggaggaagcggcgtggaaacattgctactacgtggtggtgtagttgcaatggaattatcttgggctgtttgtttctttgtgtcaatgttcgctgtctctgaaggccggactccgggagtcgacgaccttcgctctatagtttctttgctggctgtagtgaaagggagttttgacgatggcgcctgggattcctcgcttgtatcatctgacaaggagtagatgtattggacaagggacgtattgacttggtttgctgcttttcgtacttgatctgagccactggacatggccggaagtacttgagtgagcagccgcggaacgaaaggaagaatatcttcagggctgatctcgaaaaaggcatcaatccaacgaagggccgtcaattgcatttcctcctctaaaccaacgtaagcatatgagaatcagaggggtaaagccactcttaccataggtggtattgacaaagccgacaagaatattaagaatcttggggtggtcgatctgtacatcttgtcccgggatccaatctccatctgcctgagcgagttcatcatcatcgagtgtcgaatccgaggccgagtcagcgacggcaaggtcaaatctgcggtcactggcgccatcggcctgggaattttgccccgtcgcattgctcatcgtatcgctggtgggcgactgtctgttgcttttctgacccttccggctttcctcaatccccttcttcagtcgggtaatcctcttgatctccgataagaaccgatcaagcaaaccttgggttgcaatattcacgtctttgttaggcccaccaaggaacttgatcaatccctccaagaactctggcaaatagctcacgagctccaggtcagggattgtatctagaagggtaagccacgagactagaaagttgcgagtgaacggttggatcacatgaatccgatctttaagcagaggaatgaatcgtgcaagagagaatgccatgggaagttcctgctcatcctgattctccaattctggagtatttttctcagagagctgtaggatcgacacatatgaggcggcagattcagctacgatatctttcaccaggcgatccagaagctccgcgccgttcttgactgatagctctgcatcggatgcaagctgtattgaatgtcagctgtgttacccgaattaaaccgatcgacacctctcaccttagccaacgcgtcgaaaacctcattgaagaacagcaatatctctcccttggctactttggctatgttatacatgctctcgcatgcatagtaccgcactcgtgcatcttgatcggagaagcatgcgagcacaggtggtacaatttcacccaagtatggcgcaactccttcctatatcccaggtatcagcgagtccttcaagtagttatagccaccccttaccgatcctagtgcaatcgaggccgcagccaatccgatcaggcctccattccgggcatggggttggtgcacggcgtatgcataatcgtggcagagctgctcaacgatcttttggattttctcctggtctccttggaaaacagcgtcacggacaatcttctcgagcctagtgtagatagacagcagtcagtgtgggttctttcaagtgcggagcggtgaaaccgagctgacatactccaaggctccctgtttcctcctgtcgtacagcttgtcattcaataaccgctggattgcttgatccattgtcaaagcagcctatgctgcaatctttccccagtatggtaggctaagcactgctcattgtgaatggaaggtatctcagcgcgtctgtttcgcgagacggtcgggagcttggaagttgggtgtggggggtaagtgtgatgataaggcgcacaagcacaaaagcccaaatcgtccggcagcttttcgatcgtggtcacaagtaaaatcctaatgaacaggtgagggagatgcgttggcagtgtggagatagagcggtggtgtgacgtaaggtctgcgcgctcgagccttaccgccttgggctttagctctagataagtcgtgcacctgcaggtgccggattcgtaagctgcgatggaattaaagcttttttatatgattatcttaggtgcggtatgcgtgatgaccataagcaagataaacggaatataagaacaaagaacccaccccagcttcggaacagggtcttgactacttggcgcccccttttagtatacaaaggcaaaaattgtgagctgtactcgtataaatatctaaaagacatccttaaatgtagatataatacccctgatatcatcttgggccaaatagatctaattactaaagtcgtatgttgtatggcgccaaggacagagacccgtgagcaccgactatttttgtactggtgacttgaataagaaaaatgtcaagagataaatgatttcaatcttagacgttgagtatatcaaagtccaagtagatgactatgaaacaagacgaagatgagaagcagcacatgaccaagcaggcatatcgcaggagatatcaagatctaaaatgagaaaccagatcccaacttttcgaacattgctccccgctaacacatagatatcataagactgagacgcaaaggggagtaaacaatcccagaaaagacaaaaaaaaaacaaacaaacagacagggtgactgtacaagaattcgtcgagactccgcggaagcatcacgcaaaggtatagaacagaagaaaaagtcttcagaaacgagagaacaagggtgaaaatgctaaagacaagtagaagaaaaagaacaccgataacacaaagaatcgctcaggcatgtcgactggaaatgttcttcatcgggatgcctgagactggccgctccatcctgatgggcgccagctagcagtggattgtttggatgagccggtactcgtgggcgagcttgggcccgtgtagacatattcgccgtcgacgtattgcgcacccgtggagaagttgctgcggtgcttgcgacgcgcatagcgctgttcgaggcggtagagttcgagttctgctttggtattagttatcccagtatttcaagatttcattgcatttcgcagtgacgtagcatcggttggatgttttttcgggagtcgcggaacgtactggcttgtagtttatcgaagagacccattgtgacggttgaagtgcaaaatgtagcaatggataggcttaagattgggtgttctgaaactggagagagtgtgaaggcgacgatcccacgtggtggaacgcggtggaacgtaacgcgagcggagttatgccggaggaaaaattgacgtctctgtgaagaacgggtcagtccctgacgatccacgttgacgtgtctgggtataaataagaggctgggcttactggataacgatagtggtttcggtaagcgccggtccaaggccgagacttgagataagcaggagtgagggaggtacagggtctatggctagcgggacagcggggttaaagaatgtcgagatttcaaatcaattgaatgagagtaaagagggatacgatttccccagaagtcatcaagagtccacgggtgtcgaggagaagaagagagccttgcagaaaagaaaaggggggtgtggggagactcgactaaattagcgcctcaatatccggagaggctagacaatgcgcatgtgtttcatgtagagatgttgatatctgcgtacggcgtattgatttggttgaaattggtagacgagtatgctgtagatagaatcgaggacagtgccatctaacctgcacctcaccaggtcgaatgtttctttttatagacaccacgcgacgttctcgatgtccagttcgcacagaccggtcgacccgctctatcacgacaatccggactaaactggatttgacaagtggagagagacgttatcttaggaagggatttaggcattgaaggggcatctcctaatctaataccacgtggtcgcaacgtctgtgctgtactccgtaaacggggggaacgggcctatctgaattattgagactagcatttcaataacagaaatataatgtggacttcaagcacatctcgccttcagattgcgaataaggcctgattgcgggtccagcaaacaacgaaggttacccgaattcgtttgtgtacttccgaatcctgtccgttggttttatttcaaggatggatacgtgtaaacagttgctgtgtggagctttgcagatattgtataatagcgtgtttgccgccgataactctccaagatatcaactaggcatgctgactaagtattcagctatcccatctgggcccttacatttgaagccttccatattttttagaagccaattcctcattcctgcctttgtaaattcatttcatatttggcgtggcaaagatctcggaacttccggaaagtgcgggtgcatccggaaaacagaagtgggttatgggtaacctgccatgtctaccatcaaccatcaaggttgacatcatggttgacacacagtggtattttggacggattacctctagaacaccatttatggggtcgtgtttctcaaaatgaggattcagtcgtctcttccgagatttcaggctttgttggaatcttaccactgcgataatcctacttttaatggtagttgtttatatagaccgtctggtttttattgtagcttcgagaagccgatttggatatttcaaatcaatggtgataacagtgataaccatatgcaacaatatctttgacctgaatgcacgcagcaccatacagctcacattcactccttcttagacattttctcgcccgaatctttcagttccatattgccaagttcctctccatccactatctggccgagttcattcggtagccggggtccaagatactgaccccttttagaaaagacatacagtgcgagtacagccgccgtcagaccaaccgacacgacagagacgtagttcatattctctttagtcaccggcatctcagtcgggaggaagcaaaggatgtcaagaagaatcacccatagcaccgagataagattgatggcaaacccaaatcgaccgagcgaaaagggccgctcaggcataatgtgccgaccacgccacaaaagaatagcctgcggcagggcacaggaagtttgcaggaagattacggcggcaccagccatcgcagaaaaggcggttgatgagccgaggaaaatcaggccgtatagctggtaaccggggttagaaatgaccaggctttatcacatgagatacttaccgaaacaacgatgctactcagacagagtgcattcagtggaatctgaaagttagggttgacgattgcccatttttcactaaatggaagcatgttatcacgtgagacagcccagatcgttctcgagcatgtggtgcctgaagtacaagatataagcaagtattcaaggataatcttccaaaaaggagtagactcaccattgccaacggtgcacccaaaaaagcagaacgcgaacaaagccaacagaacagacgaagctcccttagacccggtactttgatagtaaatctcgattaggggaacacccgatggcgaattcagaactgcgtccagatcggtaatggcattcatgcaagcggcagaaaagggaagcgcagtaaccaagcccataaggacgggatataggatgaccttaggcgtgtttcgagcagggtcatggatctcttcgcagacatgtgctccgcagtccgttccaagaaatgcgtacacggcgttactgatcgctagtaggaaggcgagcccatcacttttccaccctgttccatttgtggcatcgccgagtgtccacttaggagcggcgtggtttgttcgactgcaaacgaacagcgtgatcgttgttgcggtgagagtgacacatgcgacgaggactgccgataggttaaggtcgttagattgatattcaataggaagtagagcatggattgaccaacagttcaaacgattgtaaagaggaagaagctgtgagccccaggtattgagtgcgaccgagagccatactatgccaagatagacgagccattgttgccagttctggatctcatagtctggataccagagaaccacgatggacaggattagggatgcaatgaagttgcaggctgcaccgctggctagccaccaccccaaaatgctcaaccagccattcctgcacaatatgttagcatcaaccatctgataggtattggaagcacgaacatgtaagaagcaaaagctcgccaatctttagatgcaagacagaatgcccagtagtactgagcaccggcgactggataggccgatgctaattccgccacgccagccgacagaattgctgtcatgagagcagccactggaagagaccatatagtgccagcggccgaggcctcctgtaaagagataccgattgatgagccagtgccggaccaagtgcacgttagactgaaagagagggcaacaagactgaatgtggagaattgtcgcggcatcgcacgttgatatccgcgagcttcaagatcgatatcatcctggaactttggcgaatgcatagtggtggtatataccctgttatgaatcttttgtttactgaaaggcaacatggcacattccatgacttatatacttctgtaaatgcacaaaaaggaacagcctggcgaactcttcgcctttagtcatcgttatcttcactgctgtttctcaatcaaagcctgaacgttgaccccatgaagttgaacttcacaatctattccctccgctcccgataactcgatggacggataagagcctcgatatcgggtatggatgaggtctatgtaaacgattggccaacactttcacgcctttaccgcttgcttgctgattggtctgtttccaccaccttctttggacgtttctccaccctcagaccgtctgataacctcgtaatatccctagaacgcacttccccaccaattctgcgccattagcgccaggttatttgatatgatttcttccagtccactgtgccctctcaacctgccctgactatcattatgcccccaacagaagtcactcctttccccgcatctgagcgaattcttcctcggcggattgtcaagaggagaggaaccactcgtgagcgcacgggatgtctgacctgccgacaaaggtaaataatcgatctatattctccatctttgctctggtcgatgtatatatacttacttctcccagaaagaagagatgtgacctcggccaacctatatgcaaagaatgtgtgcgcttaaattataggtgtcagtgggaggaccctagagcgttcggcgacaaccataaagctgccccattgcagcaaatcgctcagatcaagaatgaccaaaatagcatgtttcgcctcctgcggaatcccgatcctatcctattctgggtcgatgcgcactccgattgtgcgagctcgtcgagtcgacgtcattttctccgctattacactcaaacttttagcattcttctcaccagtaacatggaaaataattgtttcttatctggtgggtctttggtgttgctccatactttcacacctagtggtgctgactccgtcttgatagcatttctccccatggccatgtatagcccgcccctcctgacctccttggtcgcttggtcttcttctcatttgtcattacgtgatgattcgttcctgcaagttgctactcagaatcggtgcttggctcttcgggatctccgacatgcacttgattccgatttagtcaatgtggagatcacccttgccatgtcgttggtcttgtgctcattggagagcataatggccgataacggcaatgcttggtatcttcatctcgttggcgctgccggggtcattgcctccaaactcaatacgccggagtcactaggaggctccgaacaaatttcggaacgcatgctacgacatttcgcagatgcgtatacgggccgctggctgctgcgcaacttcgcatatcgcgacattgtaatgtccgttgcgcaggaccggccgcccttgttgagctcccatcagcttctaacactggacgagccccagctgcctgattcacattttgggcttgcgtcggagatcttagagattctctcaatcaccagtacactcaaggggaaactgaagaatttgctctctgggccagcagttgcgggtgaatctaaccaggatggatccgatgatggccaacaggctatgcgaatcctcgaaatgatgcctgaatttgcctcgctcgaggctcgccttattgactggaagtgtcccttgtctgcggatatgtctttagcgctcttggctgagtcctatcgcagctcggctatgattcatttatatcgtgtcatgcgctgggcgtgtccggagcgacaagacgagcttttagcaatgactactggtcaggtcgccgcaattgtgagtagtgtttcacagatgccgacgcgtagtctaccggagtgtgcattgctctttcctctattccttgcagggggagaagccaccctagaatcacatattcagtctatccgacagcgaatgcttgatatgattaaatcccggttgtttcgcaacgtggaagtggcgctgtccgtcctggaaaaactatggcggctgagaatggtgggagaatcaatggaaccctctgtgcgaattgactggcttgatattgtacggcaggatgggatctatctttctttatcatgagagatttcatgaagtctatctccttggagcagcttttaatcatgttgtatgtataaaatgacacgagatctaccgcacaaactgatccgcaaagctggcgcccagaccaacctcctcgtagtgcttccgcgctgcctgaagcttgctgaagacatcctcaattcccaatgccttgccgtcaacatccacgtagatatacgcgcccgtcacgtggaacaaggtaatcatctcctgaaccccatcgggcacttccaaagtgtggatgtcgccggggggctcgaaggcatatccaccttcctcggcccaccaagggtgctcaagatagtgccatcgaccccgtagaacagtagcatggacgggtcctgtgtgtcggtggcgtgacaagattccgctcttcctgacgcgtaggatgttcacaaagtatccgtgggacacattgaagcataacggacgaaaccaaacatccttggcctgggggacccaaaaccgctcgtcacattccaagtcgagaacgccggtgactactaagtcgtcagggacactaggcagcttgggaccccgataagctgcggtggaaagatcgcccttctccattgtctgaacagccggcattagttagctagtgtcacaggcgttttatgtaatcgactgtttaccttggacattttggctttgtgatgatatggtcttgatgtctattcggatatgtcggacctcgggagatccctaggtcttatatatacggactcgtcacggtacgtagtcgccaatcttccggcgttaagggcggcgaaaccaatggatacttcaactgcctccacgattgcactaaaatctacaatcttggaataacagggtgggcctgtgatgtggagtggtctttttctggcccgccttactgggaggttagactttcgactcggcgtcaacagcggctttttctagcgtcggtaaatgaagttagaatttgggctacaaggtgatgtgaagttccctcgttataaaaccaaataaattatcctgctatccaggggtttttctcaagctaaccgaattctctgatctctcactatttattcccttcgaaatggccaccgacgagttcgttgcacgttcccacatcctacaccgggcattctccgagcagcctgcgaagatagtgggcggtgatggtatcagtcttatcttagacaatggtgagaaagtgatcgatgctagttgtggtccatcggtatcttgtctaggtcacacccagcctgaggtttttgacgccattacgaatcacctcaaaaatgacatcgcctacgtttattccggctctccttacaccaatggcgcgacagaggagcttgctgatatcctcctcgctgagaagcccggcggtttatccaaggcaatttttgtcaattcgggtagcgaggcgacggacgcagcgctcaagctagcgatccaatactggcacgaacgtggccagcctcaacgcacacattttatctctcggaagcagagctaccatggtaacactatcggcgctctatgtgtctcgggccatgagtcgcgaagagaattttacaaggatttcatgtcatctaatgtgtcctttgtggacccttgctacgcctaccgcatgaagtgggagatggaatcgaacgaggacttcgcgcaacgcttagctcgtcaatttgaggatgaaatcatccgcgttggccccgaccgcgtcgcgggcttcatcgctgagactgtcagtggaaccactctcggctgtttgcccgccgtacctggttatttcaaagccatccgggatatttgcgacaaatatgaagttttgctgatcctggatgaagtatgaccccgtttcttcttccattaaggtgctaagcgctttcagttaagcgcaagacggtgattgactattttacagatcatttgcggcatgggcaaaaccggcactatgcacgcctgggagcaggagggtatacgtggtcccgatattcagaccatcggtaaggccctcggtgcaggatttgtcccgctctccggtgttttgctccatcagaagatattcgacgcgttgtctgcaggctctggtgggctcgcgcatggccacacattccaggtatattactatgggatgcacagttgatggctgaaactaaattggttgttaggcccaccccctggcgtgcgctgctgctatcgcagtacagaaaatcatcaagcgggataatttgatcgaacgagtggcggaaatgggccataaactcgaagcgcttctctatgaagagatcggccctcttccactggttggtgatatccgcggccggggtctattctgggctattgagtttgtgcttgacaagaactcaaagtctgctttcttgcctcgggacaacttctgtggcaaggttgtgaaggtcgctctcagtatgggtttaaatattctcggaaatttgggccacactggtgaataccaggttgatcacgttctggtctgtccggcctacactacgacagaagtggagctcgcgaatatcgtttcgctacttagatcttctattttggagacgactcggcaattcgtcgtggcggagcaacctaatgaaatccccaattgcaaagtcaatgtgaaggttgctgaggtcgggcttgtcgagatatgaacaagagtagctgttcttcttctacgagaaacatgaagaagtccattgccaatttccaagggttttcatttagataatattctacatgtatcctttttcgggtgtttcaatttatttagggaatgatccttatcatagggaatgataccaatctggggtagcaatatttgagtcataagtatgactgtaaacactggcattgggtcctacaggaaatgtgtacaatgtcccaaaactcattattcaggcaatttggttccaatattgtaagacagatgaaacccatttgtgaagggaatatcggtaagtccctctatttcaagcctatggttctcttgttctcctgcgacggtattgcattcggaggattccccgcatttgtcggaggaagagcttctttaggcttagagttttgctagataggtccactctcgcctatttgggctgaaactcgttcctgtatttccagtcgtattcaaacattgaaagcaaacaatgtcaatccagacaccacgccaggcaccgagctaggcgccgtatcatggacgtggacgtgagacgaagacgggcccgtagaggtgtataagaaggaaaatacgtgtgtagagtacgtcagctaaaatgaatagttagaatgtattttttttttacctatagaggatataaaacaatggcaaagcccagaatataaagtgatgatatgaagacctcgcaggcctaggctcaaaaataatgcatacagagtatctcctttaggtaggtgactcgatataataccccatttggcggtcagctatttttgggacgcggcagtttggtgtttgggagcctcaggcgaatgcgcgacgcgtcgacctcatcgcacttgcctcgcctcaaccttgggatcattgtagagctaccaaagttggtgtatttgttttatctattttgggataaatgtaagtcctcatcttaatcgttttcaagtccatatgctgacatgcctggaaggtatcgacaacgcccggccggtggcgacgacagcgtcaagactcccttacaaccgaaatctgttaatactcagaactcgatcgaccgacttgtaaggccatttaagtgtccagggagtgcaacacctactcgcgcatctgagaaaccatcaagaaagagacgaaaggtcaactatgccaacgccgacgggagcgtggaagatggagcggagaagccatacacgaatgatgaccggctcgctttggaaacaagagaggccaacagattccccgcgtataaaccgagggacaaagatgtggcgttcaggtcacgatttcaggttccgttcattaacaaagccaccggcgaatacagttccggtcgggtggctccaacattggggatgcgacaaggcgcgacatttgtggtcaagccacttcatgaccccagtggagaatttgcgattgttctatacgaccctacagtagacgacatcgaggaacctgcgcccaaaaacccagaagcaccgacggaggatacaccaacattggatgagccaattatacataagagtctagcagacattctggggctcaaaaagaacgtggaggaaagaccaaaggtgcctgtcgtgattgatccgagactgtgcaaagtacttcggcctcatcaagtcgagggtgtgaaggtattgcgctccgagataagctgtgccatgggagaagagctgacactatgcttacgtatagttcctttatcgatgtgttactgggctggttgacaagaacgccaatggatgcatcatggcagacggcatgggacttggtaaaacggtaagattgaccaaccatgtttcataccttgcttctaacgaacacagcttcaatgcatcgcattgatgtggacgctactcaagcaggcccccgaggccggaagaactaccattcagaaatgtgtcattgcatgtccgtcaagtttagttggtaattgggccaacgaactgggtgagttatgcgtaccctacttcttattaacttgactgaccgtatcagtaaaatggcttggaaaggacgccaccacgccttttgcgatcgatggaaaggccacgaaggctgagttaataacacagattaagcaatgggccattgcgtcagggcgtggaattgtcaggcccgtccttattgtgtcctacgagacactccgtatgtatgcggacactttgaatgataccccgatcggacttcttctatgtgacgaaggtcatcgactaaaaaacaaggaaagcttgacatggactgctttgaataaacttaatgttactcgccgagtgattctttctggaacccctatccagaatgatctgtctgagtacttcgctcttcttcacttcgcgaacccgaaccttctcggctcccaggccgatttccggaagaggttcgaactaccgattctgcgaggccgggatgccgcaggcacagacgcagacaagaagctaggagatgaacgcttactggagctctctgggattgtcaacaagttcatcatccgccggacgaacgagctcctctccaaatacttacccgtcaagtatgagcatgttgtgttctgcaacatgtcacaattccagcgcggtctttacaaccatttcattaagagcccggagattcaaagccttcttcgcggcaaaggcagtcagccgctgaaagccattggtcttttgaaaaagctttgcaatcatccggatctgcttgatctagcgaacgaccttccaggatgcgagcacacgttccctgaggactattcaccacccgattctcgaggccgcgatagagaaataaagagttggtactctggcaaaatgatggtgctcgatcgcatgctagcccgaattcgacaagacaccaatgacaaaatcgtcctcatcagcaattacactcagaccttagatcttttcgagaggctttgccgggcgcggggttacggctcattgcgcctcgacggcagcatgaacattaagaagcgcacaaaactagtcgacaagttcaatgacccagagagtccggaatttatattcctcctaagtagtaaggctggcgggtgtggattgaatctaatcggcgccaatcggctggtactattcgatccagactggaacccagccgctgaccagcaagcgttggcacgagtgtggcgagacggacagaagaaagactgtttcgtctaccggttcattgcaacaggctcgatcgaagagaagatcttccagcgccagtctcacaaacagtccctctcgtcatgtgtcgtggactctgcggaagatgtcgagcgtcatttctccctcgactccctgcgagaactcttccagttcaaaccagacactcggagtgacactcatgacacattcaaatgcaaacgctgccggcccgacggcttgcaatatatcaaggcccccgccatgctgtatggtgatactagttcgtggaaccattttgtcaatactggcgagaaggggccacttaatcaaatccaggatctgcttcttcgtcaagagagtggggagcaggatgtttcggctattttccagtacatcagtcactgatacacttatttggcatacttgggcaggttcggagttactacattattgggcacattgtatctttggagtgtattcatttgggaaggaacaatcatgaccatagaatgatttgatgttttgttgtatcatcctgccgaaaaatgataatatttttgcattcaagagcagtaggacttaggtacttagcaacgaagctcaaagtgctctatatatagccttgctgggccgtgcgcggcacttggacttgtaccgtgaaccaaagctggcgaggcagagttcaggcagatagatggagagaatgcagaccatcgaaggttaaatataaaaaagcgatctatacttcttatgtattctaccgggtctatattgtacatcttagggttataagccagcgtgtctactccccaccctctcttatatatttctatcgtctttctatatatcacactccaccgagaacatagaatcatagaatatagtcatcctcccctacagcgacgattctgtcatcccaaactaatttccgtgtaaccgagatgactatatatatatctggtaactacaggtgtaacatcatactatagggtacgatccgccgttatatgatcgcacatacaggtccaggacacacccccgctatttccagcttctatactgcgtagtgcatcaatgaaccaaaggcccgcaatcacttcaggatatggcccatctgcctcggcccgccccggggatgctctactggtatatattcaccggcacgtgatgggccaccccactatggaaatctggggagcttggaatcattaccgtttgtgtcaagaatcttcaatctggcccttggagctgacatctcatggccgcagacttctgggctggctacatcagcggggccattgggatcatcatcggcaatccccttgatctcatcaaagtccggctgcaggcgggacactcacatgcagatgcatcgcgggcacaattgagccgcttcgaaaaagcaagctctcttgttcgaggtccgtgccaccccgattcagcgataccgatagcaaaatcaattgaccatcgttacaggcgcggctgctccgatcctaggctatggagctctcaatgcgattctttttgttgcttacaaccgatcgctagcagcattggacgggtccgtaacggatcccaccaatcccgtgggggtctcggcttacaagatctggctggccggtgcggtaggcggactggctagctggaccatctcctcgccaacggagttcatcaaatgtcgggcacagctggatcgccggccagatgtctcgtcgtggacggtcgccaaggatattttccgaacgcgtggttggaggggtctctactttgggggcttgattactagcgccagagattcgattggctatggattctagtatggaaccaacacgccactcccggctaccccagtgtatcaatctaggagatctagtgctgacgtagcgcagtttttggtcctacgaactttgcaaacgatttatgacctcccacgatgagggttctcaccaggctgctttgaagattctgctttgcggtggcattgccggcgttgttacttggggctcggtgtttcctttggatatgatcaaaacacgactgcaggcacagacaattacggattatgcgcctgggactgagagccaatctctgttacgttcacagcgccagacgttgaattccttccagattgcgaaggaggtctatcatgtcgagggtatcaaggctttctatcgtggccttggagtctgcagtgtcagagcgttcattgtgaatgccgttcaggtatgttttctgctcgttgtcatgaactaaacaactgacatctgctagtgggcggcatatgaatggttgatgaagagctttaatcattcctgggatgcgcaagtgacaagccaggagcccatcgcgggcctgtaaccaccaccgaggttagaatatagaagatctaaaacacatcaacacagcagcagccaagctacgcagttaccggggtccgatttaggttagattctatttggtattgaggtatttatattggaattactcggtagtattgctagtaagggggtaaatttcgcccagatgttgtgttttcgccgatagtcggcagtttcgagtcacccgcaaaacggaagagcgaaaccccggcgagtatcggcaatataaaaaataattgcctcacgtgatactccaccgatatgcatgaggaaagtcatcagaatgagtctagatggattgtcctggaaacttttgtatgtcgatttgcgtacatcgattgctggaaagggtatcatggtcgcgtggcaaaggtttgatttttatcccggaaggcgaaggtcaagcttcgcttcactccttcatctcgtcagaattttcttcgcgcttgccgttgtcgatgagacctagtccgatcgcacgctcggcaagcaattggctgtgaggctcatcgcgcaggatgcgaagtctaagggtagctagttagcgatgggatatatcatataagacaatgtgcgtcgggcactcacctccgcttgtggttctttcctcgggcgtgcgccttgaggttgtagtcactctcaaaccatttggcgcactctgtgcagtagaacttgcctaggccaggcaggtcctccacatccttcgagtccttgtacttctggaggtgacggggagttttgatatccgcgacgacttgatcgtagtctctgtgggtgggttagccaaaaataggtacacggacaacccctatgccagacgtaccttgtgcggcgcttgttcttgactttcctgagagcacccattgtcacggatagccgaaatatctcggagctggagccgagcagtatcaaaatagatgcaagggaatgaaaattggttatcaccgatttccggagtgaacgaggtgcaaagcgggtcaagagaggcttcgaacaacaaaagcgagtgttcgagacgaaatttccgccgattgtgggtcctggccagcgattgaaatgcacggccgctgattggctggcgatcagagacggcaccttgatgggcgatgtgggattgccgttcggctcacctcggcttagttgatttcgtcaccgtacatcgctgtatttaatgacgtttgcatgaggtatgtggtttgcgatatgtaattcgagtctacgggttgaatggctacttgaatatctacatagataacgtagatctaggtgtcggatatactataggatctgaagtcctgtccaggtaaatctattaatatagcactatatcgtggcatcatcgactagtaaacagatgttgatcattggcgggcctcatccctatgaaacccatcaaatccacatgtacgtcaagctatcttttgacggatagcacggggtacaggccggaagagttacctgaaggcacattgaccattccagagccctttggtccgaaatgggagagctgggcgaaaggggccatgtaattggaaactcgctgattggtggccgagttatacccgtcacatgccttgtatcgagattacggtcccggtacatccccaggcaaacacacaggccacgaaggttgaatatgagaacttcacatagggaagacaatatggagagaaaaaagatcggctatacatcctacgtatgagctattgtctagggtagtaaatcctgaaaaaaatccagccaaatctcgagatctctcggctattagcagcctctatcaaattgcccagcccgtcttgccgtcgcatgcggcaggcttactttagtacaataccaacgtatcgtatcgccgtggtaacagcggttacggctctactcccggtccccgtagaacctttctcccactcaaaaccaagctttaatcctcttcttccttttgatctcttcttttctcatactactctccactctcatagtttggtgaatagctcttggatgtgcaatcccatctcgtagagcttccatcatgatttctacacgcctcgcgcgcgctggtgcgctggtacgtcttccctccctcagctccagcttattattgccacatggcaataatcctgagtgccagtcgattcttgatagatggataactaacttgtcttgaatataggcccctaagttccgtcttgtaagcaacgaccttgtttccaggcttccaaaacatgtcgcatggcacttttgctggcgtgcatgatagctcggacatagctacacctgcagttactgacttttcaatgtttagatgactggaagccgggccttcgctactaccgttgaccccctcgaccagaaggttgagatgaccaaccacgaacatgtgagtggctgccagcctagcgcccagaacccggcgtggagtacgattccaagcaatagcgactaacctatttcatattagggtcactacatcaactacaagaagatgtccgagaacctcgccatcgtccgttcccgtctgcagcgccctctcactttctccgagaaggtcctgtactctcacttggacgacccccacggccaggacatcgagcgtggtgtctcttacctcaagctgcgccccgatcgtgttgcttgccaggatgccaccgcccagatggccattctgcagttcatgtccgccaacatggagcgtgtccagacccccaccaccgtccactgtgatcacttgattgaggcccaggttggaggtgagaaggatcttgcccgtgccaacgacatcaacaaggaggtctacgacttccttgcctccgctaccgccaagtacaacattggtttctggcgccccggctccggtatcattcaccagatcgttcttgagaactacgctttccccggtgctctgatcatcggtaccgactcccacacccccaacgctggtggtctcggttgcgccgctatcggtgtcggtggtgctgatgccgtcgacgttatggctggtctcccctgggagttgaaggcccccaaggtcattggtgtccgtctcactggtaagatgtccggctggaccacccccaaggatatcatccttaaggtcgctggtctcctcaccgtcaagggtggtaccggtgccatcatcgagtaccacggtcccggtgttgactccctgtcctgcactggtatgggtaccatctgtaacatgggtgccgagattggtgctactacctccatcttccccttcaacgaccgcatgtacgactacttgaaggccaccaagcgtcagcacattggtgacttctctcgccagtacgctgagtcgctccgcaccgatcccgatgccaagtacgaccagctcgttgagatcaacctcgatgagctcgagccctacatcaacggtcccttcactcccgatcttgccacccccatctccgacttcaagaacgctgtcaaggccaacaagtggcccgaagagctcaaggtcggtctgatcggttcttgcaccaactcctcctacgaggatatgtcccgcgctgcttccatcgcccaggacgccattgaccacggtgtcaaggccaagtctctgttcaccgtcacccccggttccgagcagattcgcgccaccatcgcccgtgatggtcagctcgagaccctcgaggagttcggcggtgtcatcctcgccaacgcctgcggaccttgcattggtcagtgggaccgcaaggacgtgaagaagggtgaggccaactctatcatctcctcttacaaccgtaacttcactggccgtaacgacgccaaccccgccacccacgcgttcgttgcgtctcccgatctggtcgtcgccatgaccattgccggtactctcaacttcaaccccctcaccgacaccctcaaggacaagaacggcaaggagttcaagctcaaggctccctccggtgacggtcttcccagccgcggctacgatgctggccgtgacacctaccaggctccccccgccgatcgctcccaggtcaccgtcaatgtctcccctacctccgatcgtctccagattctcgctggcttcgctaagtgggatggcaaggatgccctcgacatgcccatcctgatcaagtgtaagggtaagaccaccactgatcacatctccatggctggcccttggttgaagtaccgtggccacttggacaacatctccaacaacatgttgattggtgccaccaacgccgagaacggtgaggccaacaaggtcaagaactgcttcaccaagaagtacgacgccgtccccgccactgcccgtgactacaaggctcgtggcgtcaagtgggttgtcgtcggtgactggaactacggtgagggatcttcccgtgagcatgccgctctcgagccccgccacctcggtggtctcgccatcatctgccgttccttcgctcgtatccacgagaccaacttgaagaagcagggtatgcttcctctcaccttcgtcgaccccgccgactacgagaagatcggacccgaggacaaggtcgacctcctctgcactgagctcgccgttggcaagcccatcactttccgtattcaccccaaggacggtggcgccgctttcgacattcccctccagcacaccttcaacgagtcccagttggagtggttccgtgacggctctgccctcaacaccatggcccgcaaggctgctcaggcttaaatgcgcttctggtgtcgtgactccccaaccttaaaaccttcaagtgtttcggttatcgccgagacacctgtgtaaactacgttctcttgtgtgttgaacaattcagatacatgcttcttgaaaaccacggtgtcacacggcagctattggattagttggctattgcccgtgttctcttttcaagagcaggatacgaggagttgcgctctgggaaaaattatgatgaacttgtgtgtttttgtaggcctgtttttctcggccttgcgttgattcccgatatctgggtgggctcaatggatataactcttttgatttttacatcactgtctttgtatgttagaaatggcatacatacacaatttccttttgtttttttcaactggttcctttcatagatcgtagatgtctatacaaagtatctcaaccgtggtccgtcatagtagacagccatgaatgtcccagagtaatccacttgacacctcggaggctcggacacatccaaggctgagataagctaccgaggctcagtttctgccccgcgtcggttggacttcagtataagattgacctggacgccatcagactgtcttattccgtcattggttcgaatttagtactttgatattttcaagtccacctctacatctcattgcaaacctatactatcgaataagcctagagcatcttgcatgataagccacccatcagttgaatgctgatctgcacttcaggacagatataaagatcgggttgttgagaatcctcccttccatctactatctccgcctcattccaaaatatggcgacccagctcgtccagcttccagaagtggagcgccttagcgcctcagtcgtgaggattttaggcgggaatccggggaaggtgagtgcatagatgccatcaagtcagtataccacagcaagctgatcgatagcaccaacgcaatacagttcacactccaaggtaagcatctcactccctcccaaaacccagaagaaaacacctaaccataagccaggcacaaacacatacttaattggtcgcggccataagcgaatcttaatagacacaggcgaaggcaagcccacatgggcagcaaaccttcagtccgtgctctcagaagaaaatgcaatagtgcaccaggctctgctgacacactggcacggcgaccatgtcagcgggctgccagatctgctcagaatctgtccccaggctcagatcttcaaaaaccagcctgattccactcagacggatatccaggagggccaggtgttctccgtcgaaggtgctactttgacagcattccatacgcctggacatacggttgaccatatggtatttatgctcgaggaggagaatgctatgattacgggtgatagtaagtgcggctcttcaatccaacccttcgatgaaaatgatatacaatgtccctcgaaatatctaacccaaatctacagacgtcctaggccacggtacatccgtcttcgaggatctcaaaacctacctcagcagtctgcaccggatgcgcgaccgcgtcgcctcaggccggggataccccggacacggggcggtgatcgagaacgccggtgcgcggatcaccgagtacatcaagcaccgtcagcagcgggaagacgaggtcctgcgcgtgctgcgattcggtaagcttgatgtcgcggatggcgagtcggcgccggagcacaagcaggcgtggacgcctattgagttggtcaagcgtatttatcgggacgttcctgagaatttgcatttaccggcttcgcatggtgtgtcgcaggtgctgttgaagcttgaggatgaggggcggacggttcatgattcggactctgggaaatggagtcttgtgagtgagaagtcggctttgtagttgtatagctatatagttttattcgctatagaaccgaaatgggatctaactagatacgttttgtcttagaataacattcgacgtcagcactcggtcactcgtcttcctggctaggccatgttgtacaaagtcagaatgaccaaaagacgaagaatttactgtcgaaaaatatctcttttgaatcgcatagaaattatagcacgatatccccttccctttatatatttccctgcagtccatgtgagtgatagaggcccaccggtagttccaacaattccaggagtgacgttcactttccggtcccccgctttgccctcacctttcaccttttttctctccctccacacactcgccatatcttgtttggtattactgctagcaggtattcacctatggagatagattgctagtttggtgctcatccggagtcaatatccacttgttccaaaggttggttcgcattcgtcatgatctccaagggtttccccgcctccaaaaccgactctaatcgcatgttcgctcgaaactacagggtccactttgcttcgactacaacttacagcccttattctaatccaaataatcccatcctctgctttcgcccggcatccgatccatcaccatgccttccgtcgagcccaagcatgaagctcgcctgcttctggtctcaaaccgtctgccgatcacaatcaagcggtctgatgatggaaaatacgatttttcaatgtcctccggaggcctggtcagtggtttgagtggtctctcaaaatcaaccaccttccagtggtacggctggcccggtctggaggttcccgaggacgagatccccgtcgtgacacagcgcctcaaggatgaatacggcgctgtaccagttttcattgatgatgagctggcagatagacactacaatgggttctccagtcagttactcctgctccccgcaagcccttggaatgtacactgatattcgttcttccggatagactccattctctggcctttgttccattaccaccctggcgagatcaccttcgacgagtccgcctgggaagcttacaaggaagcgaaccgtcttttcgcaaaggctatcgcgaaggaagtacaggatggcgacttgatttgggtgcatgactaccacttgatgttgcttccggagatgctgcgcgaggagatcggcgatagcaagaagaacgtgaagatcgggttcttcttacatacaccgttccctagcagtgagatctaccggatcctccccgtgcggaatgaactactcttgggtgtcctgcattgcgacctgatcggcttccacacttatgattacacgcgccatttcctaagcagttgctcgcgtctactgttagtataccctacgcggcttgatgttcatatctaaccggaattagtggtcttgcaactacgcctaatggtattgagttccagggcaagattatcacatgtggagctttccccatcggtattgaccccgagaagttcaaggaaggtctgaagaaggagaaggtccagaagcgtattgctatgttagagcagaagttccagggtgtgaagttgatggtcggcgtcgaccgtcttgattacatcaagggcgtgccccaaaagttgcacgcgctcgaagtgtttctcagcgatcacccagaatgggttgggaaggtcgtgcttgtacaagttgccgttcccagccgacaggatgtcgaggagtaccagaatttgagggccgtagtgaacgaactggtgggtcggattaatggaaagttcggtacgtatttccctttggtgttctgaacgaggctaatcgtctttcaaggcacggtcgagttccagcctatccacttcctgcacaagtccgtcaacttcgacgaactcatcgctctctatgccgtgtcggatgcctgcattgtctcatctacccgtgacggcatgaacctggtggcctacgagtacatcgccacccagcagaagcgccatggagtgttggtgctttctgaattcgccggagcagcccagagtctgaacggtagtattattgtgaacccctggaacaccgaagaactggcaggcgcctaccaagaagccgtgaccatgagcgacgaacatagggctctcaattttgccaagttggacagatacgtgtccaagtacactaggtacgtcaccctatccctgccaagcagccatcctgtatctttcgtatctcgtatttggttcccgactgaccattctctagcgcattctggggccaatccttcgtcaccgaactcaagcggatatcagcccactctgccgataagttccaatccaagaaattggcggaaacggatccgagcgaaagacatgtgccaccccaaacgcacgcgtaataatctttttatgtttctcttccgagacatgttgttcccagtttcctggtgctctgctgtcggaacgggtatttcaaatgaaactagatggccttcacgaacatggatgaggcgaaatgtattttcttagaggttgtttggttctgcttctatttttgtcttcttaaatctgaattctgtatacaggttttccttctagaccagacttatacagagaacatatcccgggttaatgtatcttccgggtcggcgggagatctgggcagaatagaatatccccatacaacatatggccgtgatgaaggacatctattatgagcaaacgaatcagactgggttgtccctggggaagtttcttaaggctttaggctgtaactcgcatgctgttacactcttgccttttcccccatagagctgcctcatacttggtgagctaggcgagatcaatctttgatgtaatcagactattttacttgagcctggtcataaattgcttattgtgcaaagtgatactcaggaggtcagtcacgtgcatattctgacagctcattccagccctggaggatacatgtactcactaaacactccaatcagtgagcaattctgatcactcacctgccctaatagaaggccctgttttgttttgatcgtcttgtattgttaattaggatgactttagttcggcaatcatttcggaaaattaccccccctggatatttgttttgtccaagacggtccttctctcaagccatctccctcccatcacccatagaggaggaacaatgtcctacttacaatcctaagaaatattatcccgctcgcattggggagaccgttggtcggtatcgcatcgtttcgaagctcggctggggtgctagttgcacggcttggctggcacaagatgtttctcggttagtcgaacaattagttctcagtgccatatcttttctaaaaccgcgaagttggcgatttcagtcgccccgatacgtaaccttgaagatcacaaatctcggagaaggggaaaagaaagccacggaagaagagatagcaatctcgcagcatattgctgccttgaagtctgataatgaagctatacgatacgtccggttgatcaaagagtcgtttttggtgcaagggtctcacgggcaacatatttgcttggtattcgaaccattacgagagcccatttggtttcttggaagacaccctgggagagtcggcatgcctccaaacattgtcaaggcatttttgcggatcttacttcaaggtctagactttctccactccgagtgtcatgttatacacactggtgattcactaactgtcttcctaaaaatcgtgttgactttctaactggccgcagacctgaaagctgataacttccttattggctttgaacacgctaatgttatccaacgatatgtccgccagcaagagctcgatcccgcaccgcatgtatttcggaatggacggcttgtatatcattctagaccagactttgggccactgacgaagggggtgtgtttaataaagatctgtgacttcagcgctgccgtcttcggtgatgtgacaacaccacacaaccatgacatccagcctataccattctgcgcacccgaggtccttttaaaggccggttggacttatagcgctgatatatggaacttgggaacagtggtaaatagccaagagtgagagagacctatcgcatattggtgatacaacactctttggtgcaggcgcacagcattccctggaggcgcacgttgcgcaaatgataagacttctaggtccgcctccctcgcaatttctgaagacatgtgatccatctatatgtggtcgtttgttctcagcccagggtatgtttttgccatattccgagatatgatggactctgatttactcgcatgtgtaggggacttcaaatttcctgatctgattccatccgaaagcttcaatttctcgaatgtggtacctgctgtcctctaaggggaagataaacgtctttttattgagttcgttcgcaagatgcttcaatgggaacctgaatgtcggttgactgcaaaggaactttatgatgacccttggcttcatatgttgtagtgacaagggggtcacagctatcttgtgtacaatttgtctctggctttttagggcaaggtttattatttacttcaaatcaaatacgaggcaagccgattgggcactatgtggcattaactaactaccctgcacaatacatagctggccattcaagatatcagtaagccctactctgcccgccagcatattggctgtgggtaagtcaatctgatctggtgcatataactagctcatcatgcatgctgatcaccaagcagttcattatcccaccgcccaaatctcgaaatcccgttctgaacttctcacgacaccaaaagctgtagactaccaactatgccagaaactttccgtttctggactttttgtgtctccgaatgttccgctgctgctgcgatcgatgtcggtctctgcgaacgctgtaagcagcatttttgcgccattcacgccatcttagcaacccattgttgcaaggtacccgcatcatgtaaactccgactatctgaggcgttctaatccgaccctagaaataccctcttgacgaagatgaatgggcggctgcacaaacagaagaagtaacagcccttcgacacatgatgaacgacgaaatccttcggcgtcgagcttccgaacgcaacggaggcctcaattgtgaatttgatccctcagaccctctaggacagaagcggatgtgcggcatgcatatccatcttcgaatcatttttagcaatggaacggcctggcttgctcgaatactgcggcataactacacctcattctcagacgactttagcaatctctgcttaaagagtgaatgtgctactctgaaatggctcgaagatattaacgtgccgtcgccgaaactttacgacttcggtctgcggaacgaacccgagattaaggttggagttgcgtatatgctgatagaggaactccctgggacacctttacttctccctagcccgtcggaggagcagttgcgaaaactgtacaagagttacgccgacatcttgtgcactatctataagtaccccattgaccaaatcggtgctctctctttacaaccagatggtactatctgcataggccccatcgtgggcgatcgctcaggtacattttcgcagataggacctttcagcaatgcacgagaatactacacgacatgggcagagaaatatctcgagatgatctgcgaccaccagcttttcacaccgtactctgtcaatgcctacttaatcttcaaatacctcaaggaactggcgcaacaagggcagtggaatgcgtttgaatcgagtatcgacaatggccccttcttcttaaaacacatggatgataaaagtgaccatatacttgtcgataaggattacaatgtcactgggtttatcgactggacgtttgctagggcagtgccgatgtatgcggcatttggtccttcactgttgacagcagatatgaacgatatttaccaaggcaaggctgggcatccccgggtgacagaatcctggccgaggctatacagactagggacaagtatttggctcgctttgtcagtggccctgacctggttcgccgcttctcctttgctctcggaatgggcatgtgtatgtcttgggatgaagcagttgatttgttccgaggcctcatatctacggctgaaggtatcggctcggagtttgactgggatgtctggcgtcaaaatcgtatagctcaatgggctggtgatgggaggttgcaagcccttctgcttgaattgggagaaatctagaatctcgatatttgaccgaattgagtgagtagcagcaagatcacaaaaatttgattctgattgtcgtgatggtccacaagagatatctatgagagccgaactccgtcgtattagatattttaaagacttgcaaataatcagaagtgtacatacaatttctgaaataaaatatgaaggtttgctatcaaattgccctgtcagtcgacccatggatgtcttatactatggtgcaaacagtgcaaacatgcttccccgagaaattctcgaaatcctcaactgcaaacacctcaagctcgcaaccatttgggcggtcaccatcaccaaccacctgcttgaccacctctaattactcgtcctctccaattccacccaactacaattggaagagcaaccgcctgctcccccaccaacaatggcaccaagccatctcctccgggcaacaatgcctctccgagcctcaatcacgacacctctgtccctgtcacgcccctcaattctccaatcaatcacatacctcaccacgcccctccgcaatgcctcaacaactaccccaacccctacacagccgacgaccaccgggacagaaacaaaagcgccctcccgactgcgcaaatacgcctcagccctgaagaccggcaccgtagtctccgtcggccgcatggaccgcacagtgggcgtcagccaccgccacaccctctgggaccgacacatccgcaagttctaccctcaggaaacgcactacctagtgtccgatccccgcaactcgctccgcaacggcgacataatcgagttctcgtccggcgcgccgaagagccgaaacgtgcaccacgtcgtcgagcgcatcatcacgcctttcggcgatgcgatcgcagaccgtcctcctgtgctgtcgaaggaggagcgcgaggctgagcgtgagacgcgctgggcggctaagtatctgcgtcgtgagtcgagacggcttggtcgcgaggtggatcttgtggaggaggccgctaaggcgggtgttccggtgcctaagggtgaggtgctttctactgcgcagctgattcatcgcattcatgcggagaatgagcgcgtcgggaaggttaagaagcttgtgcaggagagactggcggaggctgagagggttggacaggagagtgtgaaggaggctaagcaatgagcagttggcttctactgagaagtgtacgtttagctctttttgggacggacttcagtatctgaattgccggatttgtccttcggcctctgtggtgttgcatatcggaggtcatgtactgtattataccgcttcaatctattttcattggcattgtgatatgctgtattcctggggtggattttccaactaaaaaactaaagataggctgaagtatgtatgagaagaaggagagccatcaacatcaaaaaaccaaaaaaccaacaatggacatcgtaaacatgggtttagcctagacggaaccgtctattccaatccctaatcatttggaaacaaaaaaagaaagtcactggtatcatggaagaataaccaactcctttacccagaaacggcaaactatgcccgccaaatcccgaacccaccccggcaagagacgcagtgctccccctagcattgggtgttgcacggcctcatcttatttccattgctcgctcgaacatcatgccgcccagacccggaccttgagatcaacactgccagtggccagaacacatcgaatggacatctttgtcgcattagggtcttccttcgccccattagacgcagccggggcaccgttcgtaccctcctttgcaccggcatccttgagcaaaggcggtgcccaccggagcgaactgataaagtggtcgtgggccgcgatcgtacgcacacacttgcattcttgcgtgagatcccagcaccgcatggtcttgtcgtcagataccgagagaaggtatttcccgccaggatggaagaccaatgagcggacccagttgtcgtgaccaacaagggttttgatgcagtttccgcgggtatcccagagacggatagtcttatcgcgagaaccagtagccacaaactcggcggacgatgatgctggcggtggtttctttagccccgcaagagctgcgaagtgagggtagcttgttgccggagcgaaggctacacactcgatataatgttcatggcccaggaatgttgacttggtatcaccagacgagatatcccacagacgtgcgactcgatcgtctccaccggagaagaggaaccggccgtctggggatggtgtaacatctcgaatccagtctccatgtccctgcatggatttgacacagtatccagttgtgacgtcccaaatgcgcagtgtgagatcgcgagaagccgagactagcaggtttcctgacatgggagaccctgcagctccggatggaatgaaccgaattgctgaaacactgtggtcgtgtcctggtagggttcggatgttcttatactcgtcagccgggtcccacaatttgatcgttagatctgacgagcatgatgcaagaagtgtgcctccacgcggtccaccataatcgacgtctaacactgccctggtatgtcctttgattgtgcgctctagttcacccagctcccaatcccagatcttgattgtggtatcatcggaaccggaggccagtgaagagaatactggatggaaagcgaggcacgatactggcgagcggtgtgattggaggtcatgacgcgctggtgctcgaggcagccaggtaacggggtcttggtttttgcgattcagcgaagtcggggttgcggtatccagctcggactggagtgcagcgcatcgtgcttccagttccatgatctataccaccattgcaggttaaaaagatgtagacgtgttggtatgcccggtcgtcgcacctttttctgtaaccggactacactcgtccatttcttctccaacaggccttcatatttctttagtgtgctctcgtcgaccctgatcgagtcgcccagttcttctcgtaaagcggcggagctgtggtgcaaattcacagaggtaaggtaggcgatcattcctttatgtctgtcgcaaaacaccatcagcgatcacccctaaaggaaacagatcgggtcacatacagctcctccgcctgccgcgttgtgagaagttggctcatgatgttatatgtgctctctgttctctctgctcatccaaatgcgcatataccaagttggttcggaaaactgcgatggagggggagtggtgtgagcggtgtcgaggggagtcggggggagttagagggaggttagaagttggcaattgaagaattgatccaagagaagtaagagaaaccgaagaatagagagaaagagaagaagagaagataaatatgaagggcacgttgtgatccaccgcggggaggggagaacaaaacaatcttcgccaaggcttttgtttactttcctccaacttcaactgttgattttctttaactcctgttggtttcgactattatcagccactcctttcaatatacaatttggcactttgactgagatattcatgttctggtcaagatcagtgtcttattaaagcaagacaagtccgtctttgataccctttgggcatcaacccaacacagtacgaccatctgaaccccccgagacaccccggaagagcccccgcaacaccaactcagagcctttatatctgtccccggaactctctttgatactatgcgcacttctgctcagataccgcagaacgtgctgactcctttttttcctagaatccgttgataattcccgcccgtcgttagaatggctgaagtcccagaggatttctcctccttacccttgcccgaccggttcactcataaggtgcgctcatccctgcataactagcccgaccgataggattacggaaatctgactccgatgcacagaactggaaagttcgaaaggagggatacgaagatgcgaaagcgcaatttgaaaagacccccgatgaatcagatccgattttcggaccattcatacaagatcccgacttatggaaaggggcggttgcagattccaatgtcgcggcacagtctgaaggtctggcagcatactgcgcgtttttgaagttcggaggagtccaggcctgtacgaggtgcgtcaaccccgatcccagtcgcgacgcctgaacccgctgacaacattcccatttacaggagccgcacgtatacaattggtcctattgctgagaagggtctcccatctacacgaccggccggtaaagcctgcgcgcaagaagctattttattatgtgtcgaattagacaaggccgatccagtgatcgaggagctactacctatgctatcacacaaagtacctaaggtggtcgccggatctctcgcagttttcaccctcatttatcacaacttcggctgcaagattgtcgatccgaagcaaactttgaaggcgctgaccaaggtttttggtcaccctgataagaatgtccgcgcggaagcacaaaacctgaccgtggaactctatcgctggcttcgggaggccataaagcctctgttctgggccgatttgaaacctgtgcaacagggagatttagagaaactattcgaaactgtgaagcaagaccccacgccgaagcaggagcgattcacccgggcacaacaagatgccatggctgcggccagcgctgcaccggcgggtgaggagggtgaagtaccaactggggacgaatttgatgaggaggaggatgtagtggttgttgatgctttcgacctggcggaaccggttgatgttatcaagaaagtaccggaaaacttccatgatcaattggcctcgtcaaaatggaaggaccgcaaggaagcgttggacgctctctataatgtgcttaatgttccccgaatcaaagatggtccctacgatgagatcgtgagggggttagccaaatctatgaaggacgccaacgtcgctgtcgccacgatagctgcgaactgtgtggacgtgttggccaggggcctgcgcaacggatttaccaaataccgaagcaccattatgtcgcccatgttggaacgtctgaaagaaaagaagacgactgtcgcagatgctttgggtcaggcgttggatgctgttttcagcacgtcgacccttacagactgcttggaagaaatcctcgagtacctcaagcacaagaacccacaggtcaagcaggagactgttaagttcttggttcgttgcctgcgtacaacccgcacggtaccagccaaggcagaacagaaagcgatcgccgatgctggtacaaagctattgaccgagtcagccccggcaatccgcgaaggagctgctgaaattctgggtacattaatgaagatcctgggtgaacgggctatgaatccgtatctcgatggactggacgagattcgcaaaaccaaaatcaaagagtacttcggaaccgctgaagtcaaggccaaggagcgacccaagcctattgtggcacctccaaagcctgctgccccggctggcaggaaggtcgttggcaagaagccggcaacggggctgaaaaaattagcccctgtagctgctccacctgccccagaagaacccccggccaggccagcagccagaggcgtcccttcaaagctcggtgctccgagggccggcggccttccaactcctggatcaggtctcaaactgcaacggaaacttgctggccccggaagcactgcgtcgccggcaagacgagttgctgcacccccagaggaagatatggcccccccgccagcagctcccaaattcggtcttggccgtggacttgcgggtcggcctattgccagaccgtcggcgcctcttgagcctcctgcccctacccctgccgccaatgctttggcagatgccgagcgtgccgagttagaggaattacgggcagagaaggagaacttcagccgaaccgtggaagatctgaagtcggaacgttcgaggctcaactcaacgatcaccgaacttcagaatcagaatgcacagttgattgaggaccacacccgcgatgtcttgagcatcaaggctaaagagactcaacttgttcgcgcacggagtgacgcggaaaccgcagagggaagtgttcaaaaacagcagagagagatcgaaagattgaagcgtgaactcgcgcgagcacttcgcgcgtctgccgtaagcccacctaacgctggctccgacgcaggaagcatgggcatgccagacacaaactcgatgtatcaagatcacatcggcaatggcaatgctgcttcacgatctggtctccacatggggtcccgcttcgaaagctcgcgtcctcgaagctatgcctctgccactcccagtgaggaaagggagaacaacgggatggaatcgccaggacccagtagtcgcaatggcggcctaggccgacggaacttgagccctacatacaactactcggccatcggtagcccgacgcgctcatccgtccgaaactccaatacaaatttcaacgaagacgatcagcagcacccccgatcttctgaaccagcagagaattggaagcgagccgcagaggtcactagtcaactaaaggcgaggatcgaacaaatgaaggtgagttgattgtttatctgattacgtatgtcttgtactaacaacaatgcaggtacgccaagggctttcacgacctcctcaacgttaatgaccaaatgaccgcgatcacgtttatgtctcgtccttcttcatgctatacaccttcttcgcttcaacctgtgtctttagatggggtttctccgtgtcatcattcatattaaaatcggcggtgagcatatctggtcttctgggagcatggtggctggctgagcttttgggtttctttgtactttttcttttttttttcctctcttagctttggccttggacctctgtatcttgctgtaatttcatcataccagcctcgtgttctcttattctgctcatggatattgattcctagtatttagtgtaataaagctgttattgctatcttgctagctctctctctctctctcgtgtcggctctatttttggaaacataagccgtcgccttctatgactggcctgaataagtgcccctcaatgatgtgacggtgaatgagtgctgaagtggcactagtggacgagtataaaacccactaagactacccctccttccttaatttcttcttacttctcacatccctcttcacatctcctcttacccctttacttcatatatcaattcacaatgggctggttcgatggtgactattccccttatactacctcgataccaaccttcgactaactcccatctctagatgactccaaccaggctcaggcctacaacaccttcaacggccagcaagagcacgacccctccgtggtccacgagctgattgccggtgccgcttcctacgaggcagccaaggcctacgagaaccacgttgctgagaacggtacgtagatagccccacccagctgagccagagaaaaagctaatattaatttggcaacaggcgagccccccagccacgagaaggccaaggagatcctcgctggctttgccggtgcctttgtcgaccgtgaggtcgagagccgcggcttggacttcgttgatgccgagaaggccaagtaccaggccagacagcaggtcaacgatgcttatgacaacaacggaaaccagttctagataacgaccttgtgggtgtggcatgtggatatattgtctgtatctagtccagttatgttgtatgtagcatgtgccggagatgtgtttcaggggggaataacccctcaatttcactctcacctaccgtattaccccacctgatcttgtagtgttgttaaatcttgaataaacggtctgcttcttcgatgcaggtccgtttgatagcagtacatgtatgtatgcagatgatatgtgccaagacgggactatcctttagaaaaaagacttggtattcttggcaggtgtcaggtcgcatgaagtcggagagaagggagaaacggaaggggagaaataaattccccgattcagcgaaatgtcggtcaagagaatttttaaccaccgtctgcctgttgactctttagacagattacattaacatcatacagattaactacacttgacaagatcatctactaatttactacaatacgaagcagacgacatgaatgcctagttctgatgggctacgaagaccatcaatagattgaacaggtagaaaaatgcattcatgggtatctgcagaaaggtggtacatgggagttcgtgagagaaaatgtgtctttttttgttagaacaggatccaaaaagtgccaaaaggctctttcgcacccatctaaagctaaaagatttggccgtcaatagatcgtcaaagccttggaacaccttgtcgtttcccataacaacttattatttttgagcgcttcgattagaaacgatcccgtcaaacagacatcaaagaaaagctgtagttacacaagcttaaaccttgatggcggcatcgagagccttacgcttcttctcgatgcgggcgttggccttggcgcccatgataccaccaccccagtggcggcgggagtcctcgtgcttgtcggtgtaaccctccttgatggcggagaggagcttggcgaactcggccttgtcctcagcgcgggtctcggtcagggcgagaacggcggaggtcttcttgtggacgactgtgccgagacgggccttgcccttgacaatggcgtaggggacacccatcttgcggcagagagcgggcaggaagacaaccaactcaatggggtcaacatcgtgggcgatgagaacgagggaagccttcttgttctcaacgagtccgacgacgtggttgagaccgtacttgacgtggtagggcttcttggagacatcctccttcttcttgccgtcggcgacggcggtggcctcctggacgagacgctccttcttctcggccttggtctcaggacggtacttggagaggagcttgaaggtctgggcagcggtgttgcggtcgagagtggcctggaactgagcgatggaaggaggaaccttcaggcgcatgttcaggatcttcttctggcgctgaagacggacatactcgggccacttgacgaagcgggagaggtcgcgacggggctggatgtcctggccgataccgaagttgcgagtgcgcttctcgataagggggttctgtggggggaaggttagcatcttccaatgcactcctactgggaagaaggaaaactaaccttggcagccttcttgccagcgccagccttgccctgggggtagggcagagcggcggtcttctttccggacttagtaggaggctatcattgaggaagaagatcagcgtgctgttcacatagtgctgcatcttctttgaactctaaggagaacatgagccaagccgtgttacgggcattgactccatgcttccagccatatcatcacacgatgcacgacacatctctttcgaggctgtgcgcgatcggcggaattgcttagatcagagatctgaagcaaagcgaatatcgtgagacatcgcgagagaactagaagaagcctctgatgttatcaagagacaatttgggtactcaccaccattttgtcgactgggattgcgctgattgacggttgacggatgagaaagggaaaagttcgtgtggatgcaccttatgaagtttctgtgggtcacgctagcgcagtcatgtgattagggcctagggcaaacggttagggcagatatactcggccacgtgacagatcacatgacatcggatatctcatattctggcaggcgcgctgagacctcaggctttaattcccgtaaacaccggaaaccccaaaatcatctgatatttggaccccttttgatttctcccaaaatcgatcgacttcgattgagacgatgtcgaaatacagtcttctattccaatgataggacgctaatcatcgggagtacggaaagatcgccgctactcttctccaactctgaattgggcatggcgcgtttctccagggctacgtggaccccacaactggcaagactttcctatgatgtactaccccgttttcgagtgtcggaaactaataatgtatcgcaatatagcaaaccctgcaagtatcctcctaaggggagcaatccagacgtgaacgagaacccagctggttcaattcggtctagcctacgactggattcccgttctcatagcccaactatgttgtactgagtcgggcaataccaactgttcaccaatttcatttcttcttccacgtgcaatgcgtggatgataacggcacaatccgcatgggactttatgtttcacgaattccaaaaaatacgtgaaatttcaacgagtcaacccgctcaacctttccgatgactcgctgtcggtgacgcgagaagagaaccaataggtcatcactaactccttggagataggttcgcacttttacgctcgactaaagcaattttatttccgaccgactctatatttattgcattgacttccgacttacccacgaaagagtcgaagggcacgacgcaaaaaaagtctagaatgcattatgcctgacacacaatatcaaccaatcgcgtgcataatgctagccctcctgttttctaggagtggcaaggctgattctccgtgggtgaattatatataaagtctttgagatcggtggagcaattcagcttcaaggtttctcttagtgctgggagtcaatatctctactccttcgtcggtatctcacaaaggagtagatcagccctgcattctacgaaggggcatcatgtgtctttgatacaagcacattttctgttgaagagaaaattgtggaggtcgtcgcagaattgcgaaaagcaattcagttctagcgtggtctcctatgaacgcagcagaaggagaaatccttaatgaagtttttctcttttcggtttcaccggaagcattttgccaacgcgccacaggaataacaaatggcggggatacttttccgaaatactgcctaagcaacggtataattctacgacacttttgtttcacggagctactgtgggggtagtacaataatgaatccctcgcagtgagttgaataattgtattatatttattcatgtaccactgactggattcccagggataacgagcagaagcttccttagttatgtcatcgcgggcgagcatccgggtccttttgggtggccgtttcccagatctttaggcaataactacagattcactttccagaagattgagcttttttctgcaacaggtttgggcacagaaacattgaaaaggtttgcgcgtatgggctgtttagtacatgatattccacattactggttagagatgcgtacagactatcttaaattaaagactcggagcttggggcgatttcatagattaactgcttttcctcaatatattactccggcactactaccggtactgctctaggagaccctcaatgcgtactatttcggatttgaaccagttggcgaggcgtggatcacctgatacctgaattagactcgcggccatgttgtattggtatctcatttgcgtcaacgccgagaatgcggtttcctggtaggaacgaccgagttcggcggtgaaaagaggatcacagctcatcagacgccaacggcttaaatcggtaaagtactctccgacttgaataacagtggcgaattcaaccgccaggtcgaactggtttttgcctagaggaatggccatgcggacggcattccgaagaccgggctctgactgaatctccgattggatatgcctgagggggttgcatttgatggagccttgagtgcaaatattgcagtcaaaggaggcttgaatacgcatagtctatatatattatgttagaataccagggtatctagaatgataagagatactgactgttagaggctccatcttcaaaatgcagtgtcttgatattccacaaagctcatactctggtgcacaatcaggattcggagtgtatacagccagtaaatgagcctccggcaaaggtccagagacagtgggtaggtcaggaggcgagggccagtagatgaagagaatgagcgaaaagagaggggggccagcagaaatagagaggggtcagccgagagacagggggccagtagatacagagagaagaagtcgacaaaaagagaggggttcggctgaaagacaggggttgacttcatggtttttcttttattggacgaaaatgaggatgccagctacgtccgatgcaagcccccgtatggagcgaatcacgttaagggccaatctgcgagaaccagccattcctcgacgtcccgccagcttggaaagatcaggccgaggactttcttcgagcgtaattccgtgaatttaaatccactcgcatttagtatatgaacgtacgacttgggggtccatacttggagtagttctgtgaggctcgtccgcgacgtaaggtttggattgacatggagtgccggaatggtgctagtggcttatgcgcttcagccctctagaagccttctagacacttttagggccttttagggccttttagagccgtttggggctatggtttggcttgaaatttaggactttactaacagctaccacaatgacccacttcgaatcgtataaatagttacacccttactatatccagcggtcgtggctatgccacgtagtaggctaaacccgctctttgccgagtggaacgtcttctaatatattagctataacggttcggagaataggctattgcagatagtccttctagcggatttccatgggcattctattggaaaggttaactaggcgtccacccgtttcgatactagcgaataccgggatagggcgcgcggctatggttaggagaatgcaaattgtgggctgatcgtagactgaatgtttagcagattcctctacctttgaacaatagtgagcctgagttgttcggacttccgggatgaaagttgtttccggagagttgcttgagaggagaagggaatatgctcatgaaaaatatgctcatgaaaaccggtttatatacatcgaagaaaatgggtatttggctttacaaactccacaatgtacaatcacatcactcaacataccatttaagggcattaataaccgacaagtatataaaacatcattcccaaatcctgccaagcaagtctagaatgcgtaaccagaacgccttggatagatcaaacgggacaccacggtcctcaaatccatcaatatgcaggtcatcgaagagaaagcatctgtccatagatcacatcacctccacgctcccaacccgggcaaagccccacgacccaaactggtactggcagcctgaacagcctttctcttccccaacgatccctcctgagcacgcacaccagcaatgatcttctctatatgcgtctcaaccacaacaccaccgacaatcatctcgccgagcaccgcatgcagggtctcatagccgaagatcagatccaactcgcagacattctcaaacatccgatccagcgcctcgacaaacacctgaatcagatcaatcagagcgagtggggactcggtcgacgtagagatcataatgaacgacagcgtcgcgtaggtccggtatgtgatttgggtgggggtatcggagggcccggaggcggtggagctggcgccttgcgagaggagaggagggagtgggaggaagttgcaggcgcttgctggacgctgcgcgactagacggtatatttgcgcgatcagggattgctgggtttgtgtgtcctgttcctggggttagtggtgtcctgcgacgggtgagggcgagggcgagtgcggcggggtatcgactcaccagctgtgtgtagaatttggtcagccggggttggccattgttattgaacacgaggactgcgttgatcattttgactgatgtgaggcttggaacatgggcaagctggagagagtgtcagtcttatctggatgcgatagctgatgatgcggttcgggagacttgccccgtgcgtcgatctggagaaattgataccaacatctacatttttttttattcttggctttttgtcaaccctttgttgggtgttcgcgagtcataatgaactcaataccagcatgcaggaatcctgcatctaggatatcattatatacaaccatacgggccctatcctcggcctctaatccccactccaagcgcgaactcaaagacctcaccccgaccgacctctgctactactgggataccagacccccgaaagaggagcaactagcctttgccgataaggtattcacgccatcgcgtcactcgccgctcaaactctggtccgccgccaaattccgcaccacaccattcgcatcagtcgagccggaagtcgcattcttgggccgctcaaatgtcggcaaaagctcactactgaacgcaataatgggacaggagatctgctggacatcgtcgaaaccaggccggacgagggaaatgaacgcgttcgggattggaggtacaaagggcggcgagtcgaaggttgtgctgcttgacatgccgggatacggaaaggcgagtcgttctgagtggggagcggagattatgaagtatctccagggacggaaacagtgagtcatgatgcctgtcaacctaccgacccatggtatgtacaatgactgacaaacatgttatagactccgtcgcgcattcctccttatcgacagcacgcatggcatcaagcaaacagacgccgaaatcctcagactattccgacaccacgcaattccccaccagatcattctatccaaggtcgacaagttcctcgttaaacaattgaagcagataaagaccggggtcacgcccgccaatatcgagcggctacagctcttgctccagggcatcaaacccattgtgcagccggacccgcgggcttcggaggggcctgggtctttgggtgagattttgacctgtagtgccgaagcacggattggtcctggccgggcgctggggatcgatgctgttcgttggtcgattttgtcggctgctggtattgatgggagcttgcagggtggccggcttgctgtgccgcctcctgcagagacgccggctatcttgtcgtgaagggcatgccttgttgtccgaattcaagtttaaatggagagaagtactccgtatgttgtaatatacatacaccccccaaacctactaaatgcttatctacaatatacacacagcactgttggctgacggtgtaaattattatgggccccttggtgacctccacgtgatctagttaccataaatcatcataactgatgcatacaaacattgttaatgaagctattcagagattaccttatcaattcgtctattaattccggatctgggtagtattggtaacaaggtaaactcataaaatgtttcgaaaccacgataaggtatacatttcgaatcaggttgaagcaacaatacaacaatccaataacgccaaatgacacgctaccgacagatcgactgtatacacagcggagtaagctgtaaatctatttcttgcgggttctgtgacggccgtcccatcaaagtctggaaatcaatttccagtgcatcaccagacaccactccattcctgagcctggccgactgagtacactccagggcgtgagtatgctggccactggtagtagccccaactcttcggttgacaactggggtccaaatctcgatatctgcatcgtgagacctaggattggcggagacaaggaccacaagctgggtttggtgatccgagttggagtaccaccagcgggcatccacctgtagccgagggacggactcggataggccgacctctagcacaagagagggccatggtataggtgccccggcggccggttccattccaggggaaaacgatgcgtctgcctccttactgcacatacgaccagctgatcgtccagcccctccaagccaaaaatcatggttgatgaagctcaaccccatattactaagagcatagttaatccaggtatcaaactgacggcttattttctcatggtagtggtacggtatgatcttatataagatcatatgctcgtggtagagaattgttgcgcgcaccccttttggaacgtcagggtgttcaataagcgccgaaaaaagatcgtccgggatccgttgtaccagaaggtattgcgagctaggagggtcctctgacacaagctttgttttgagtacgtcgagataatcccagagctcatcgagagaggagggtcggtcgaggatattggcggttagaagggttgtaggatcgaccccaaggtcaatactttcggcgttagaggatggaagagataaatcggcgttaccagaaggcatagcgagatgggaggtgggaggtgaagaattggatgggtaggaagtctgagaagtttgatgaacggagagaagagaccactgatcgaaatccttgagatggagatagcaagatatgtgcttggatacttgtagagcgtacggagtagttacgacccatgatgattgaacttacgtcacaataactcagcctcgaggtgtttatcctatggtccatgttggaaacatttgaatgcttcgctacgagaaccagcagccgtaagcagaacacatgtactatattacaatacaacctaaacaccaatccaactcatgacacaatttggaacagatcataggtaaccaatctattatgggcagtccgatacggacaaagcaagacgaaaaatatgtaaaagaatcaccgatctggcaggcaacagaatgggaagtcacataagcatcaggcaaagagaaaacgtatggatggcaggatgcatggggataggcaaatatttgggaatacagaatgatagaaacctccacataagagatgatgaaagatatgaaaaaaaaacgcctggtcccttatcgtaatgctgcagaaccaaagaatgccgaccgcgctatgcaaaggatatttttccgatggaagacgagagctgtaaggatgggtatcgtgaatgggggaatagagtgagaagagaagaaaagacagaggaaaggaagttagtataaggagaaaggttgtcggatgttgatattgatcgagggcagaaaatgcgtgctaagcatctcaatcagacaagtcgtcatcatcttcgatcccgccgaggacctcctgcccacgtcggttaacgacaatgcgttttgcaagcttgctttccgggactccatcccgtgcagcaccaaagtcgagaacctaggtggaaacaatattagcattaatcattggaatccctcattagagagaacttacttcgatataagtcaaactatcacgttgcaccgcggcaacacacctccggtcattgaacttgacttgccacacgccactaaggtctgtgaggaggtctcgaacacactcgccgtttcgcacatcccacatcttcagcgtccggtcagacccggagatgaccttctgtccatcgtgctggaagcaggtgatggcaccggtgtgtgcgctcagggtgttcttgcagtggccatgcacggagtcccagattcggagggtggaatcagcagcagcagagacaaggaaatcgtgctccaaagcgagcaggccaacgagagacgtatggccttcaagattatataggatggctccatcatctagtgaccaaactttaaccatgtggtccatggctccactaatgcaacgattgcgcttatggtcaagaaccacgctatacactttcatcgagtgaccctgcagagtatgtaaagtctgtccggtggaaaccttccagaccttcaccgtgcaatcgtaactaccactcacaagggtatcaccatgggctgcgattgcacgaactgagtgctgatggccggagagcacacgcaggaagtatggacagctagcgtcatccaccgtaggaccactctgatagtagactgggtcaccgggtttgggaagcttccacacccgaagatttgagtcacgagacccagtaatgatcaatggttctttgggcatcatctcaagctgaccatctgcattcctacctacctcggcaggcagaacgatttgcaagcatcggactgtggaagtgtggccgtggaagatctgagtacacctagcccgctcgatgtcccagactcgcactgaacgatcggtggagccggagactagcgtgttgccatgatattcaagagcccacactccaccttcgtggccctccagcgttgcctgcaacgcgcctgttttagtgtcgtacacgttgatgtttgtgtcatcgcttcccgtaagaaccttgtcggcgtcgaattgcaggcaagtaacaacatgacggtcatgagcacgaaaagcgatatgttgcggcttaacatccggctgcatccatcccttatggatggcaacatggcgacggtacagaactttgaagaggaacagcccacgaagagatggtagacccacttcggcatagggcaccgacccagctgcagcgctggcagcggcgtacggggcttctgacgcggcaatgtctctcctccagtctggatcggggagttctcctccactggatgagacctttcgcttggcaagcttccggcttgaagcacgtgtgtttgctttccgcttgccccgtcggctgattggcaaagaccctagagggcttctgctgctgggacccgccatcgaaggaacaggggacccttccatatccgccctggatggagtcaaaacgctgaggtcctcctcatggtcttcagggccgctggataactgccatccccatccctgtcttatagcccgttctagttctccatcagagagatgataaccatcttgctcgaggagattcctccagctcttttcatcggaattcgtaatgtgtctccacctcttagacacctgcgcagcacgacacatcgtctgtacgtcaaggtatttgacgatgttgagactaagctcaagcggcagaagagtcaggaagtcgcacttcaatgttggattaacgacatcggccacgaaatgaagagtaggtttagggcatctccgaagaaattgatacatgagatacgtcttgacctcatcaggcaccgaatcaaaaaactccaataccttgggcatatctaagagggagggaggggaccgtgagcttgcgagagaatggtcattcacccgagtctcatctgcatcttgaagccgcaagaccttagaaaaacgcgagacattatgatcgaggctggaatctgtatcaacgtcaagcccctctgattcgaaggaggattcgccatggagggcattcatagcagcaaccggtgagagacttgggctcgggaggcacatatcctgcgccatggcattgtctattgccgatagttgagacataagctcgggtctctcttgcattgcagattcctgtgttccatatgttgtatcatgaccaaatgaggctgattcatgtgcagttgaacaactctcatccgcttcagtagcctgagattcttggtttccggggtttgaacgaatcccagaaaatgcattctgcaagtaagaaccttgattggatgcctgtaagcccttagctccgatttcagatgagagaggtgaaggcaaaggaggttccctgcgcggaaacaccgagctgtggattcttggtcttgggggcacattttcgccaaatccgctcaggttgctttcggtgtctggggtggcaaggccggcggcaagatgagttgatccgacgccactttggcgagtgcggcgtgtgatgggctcagaaggagcccgtgttgggcgagttcgtgggagaaccgagggtcgagtatcgaaaagcgtgacgggggatacggcacgacggcgagtattgaaagggtggctagaaggttgactcgctattctcggaggggtcagccgccgagtggggttctcgccctcggcgatgaacgagttcacagagcgaatcgggccatttgaagattttaacgcctcgcttttctccttgtactatatattattatactgtaagcattggattcgactagaccaagagggtaggataaaatcgtacctcggcggcagcatttatagtatcctcgggctcgttaaagatgatggacttctcgccgatcttgaacttgaggttccttagagccgctggagttggagatgaggcgagagggtactgtcggacatccagatccttgacggctcgcggggggttgattgtcaacggcgggaaggaggtagtcgtggtggtggtggtcgtcaccaccgtagtccgggtagtcggggcgaaggagaactgtccgatggaggcatttgatggcccttggcccagctcctctctttcgtccatttcacgttttcgaggacgaatgaatcgagatccggggctgtgggtcgcgtgggaggtcgcagatacggatgcgttgtggtcagtcaaagccgagtcgacttctgatatttgaagggagctgggagcatttgaagtcattgtaaagcgagctcatgtgcaagaggacaaagaactgtgaatgtcccaaattaactttttttagcaaaacaccccctcagcacggtacaccagcaaaaccatcgatgcaaagggcattcagcacatagtgtcaagagccgaggataatcaagttgttaggggggggaaatagaacacaaataatggaagcaaggaagcaaagggaaggggagaaagaaacagtggcggctgagaaggagttggggcggagaacaacatttattccggttcccgtggacgatgtcatggcccaacgtgcaacatttggattctttctgattctttgctatttagctgttgatttttcatatattagacctgttaccttgactactgtctacggatgtgaaatgccaaatgatccgagtgtgaaacctggagaaagggcccctggttctgctctagaccggcagaactgattaccagatagaggtgggaccgaggagacactcagataagccggttgacttcctcttgcccagcgcctttataacgtaataaccaggattctattagctattcgcccctaaatcataacgtaatcggtaagcgagtggccactgtaagcgagtggccaccccaccccannnnnnnnnnnnnnnnnnnnnnnnnnnnnnnnnnnnnnnnnnnnnnnnnnnnnnnnnnnnnnnnnnnnnnnnnnnnnnnnnnnnnnnnnnnnnnnnnnnnnnncgtaatcggtaagggagtggccactgtaagcgagtggccaccctacccaagagtatagttttctaaggtaaatatttcaaccagaacgccattaaattaattaaactaaaaaagatcatttatctggacacctattgatcttatgccctgtctttccacacccactacaccttggtgcagcccgtggtcgtggttctaaccctgattgagtgcttccgcccggggggtgtaggggtatttctaatgcttccaccagcctagcaatgatttcagaagcttcttgaactgagaggccttcttcggcgggtatctgccgtctagatcgggcccgcttttgcttcttattctcattttcatcccgtaaatccttgttttctttcgctagtaaaatagcgctatgcattgcaagctcgcagcctttgataagttggtttaatgcacgtttagaagggcttattaggcttcgagattgggttcgaagtaaagctttaatagacaaagcctgtcgacgtagatctttgctattaaaaggggtttttggggtgaaattccggcttgaatcgctaccccggcttagggggggggttggcgttcgaagataaatattaagttttaaaagtacccgattaggtaaaaaaggtattaaaccagctgctaagaagctatttttaattgtctccaatttaaaagcttcaatttatacggaggggtatacttcgaggaatttaagtttattaatatagttaatcctagtccgcatttttatcttaaccaaccggccatataaccgttttaccaccgtaaaacaaccgatattaagaggttataaaagataagaggaatacagtagtatataaattagtataatatcgttttccttataaatttaatcgaattgaggggttaaatggcttctatagctatcgagtactaaaagtcgataccttcctactatatataataaagttgatagtataaagagtttctaaagctagcgaagtccaatttcatctgatatctatctatttagactaactttaaagtgctagttactaggaaggccttcgaaccataatttaaggaagaccttacctttaaaaataatatatagagggaggacctatcctaccgcgtttatacatttaattgcagttacctactcgcgatttctaggttgtaaaagtaatctccaactgtagtatttacttcttattataacctttgccgttatagttaatcctattataaatccagtctcatcgaagttataaatatcatctaggttaatcccaaattaaataatagttttttaaataagattaaactattctccaatgatttttaggtctttacacttcgcgcgcttataattataacatcttaagaaccgagaggaaagaagagggcgttgttttatgaaattgtaaacctatttttcgctaaccaaaatgactagggtagttccgcgctttttaagaagaagattcgccatttcttataccatagagggccggggagctgatccacgagaatccatagagagaatccatttttgaagagattcctcttcaattgtagtcaatttagtcgagttggcgcgagaagtcgcgcggcattgtattccatcgaggcggcgccgaagggttgaacgcgggacgttaaaggtacgggcggcaatagaaatattggtaaattcttgtttcttaaaagcctggatagctagtaagatcctaccctcctgctctattgaatctttagaggattgagagcgaattggtggcatggtgggtggttgaactaagtaagtgctaattcatggacgcgtttttgggtagggtggccacccgcttaccgtggccactcgctttccgannnnnnnnnnnnnnnnnnnnnnnnnnnnnnnnnnnnnnnnnnnnnnnnnnnnnnnnnnnnnnnnnnnnnnnnnnnnnnnnnnnnnnnnnnnnnnnnnnnnnnnnnnnnnnnnnnnnnnnnnnnnnnnnnnnnnnnnnnnnnnnnnnnnnnnnnnnnnnnnnnnnnnnnnnnnnnnnnnnnnnnnnnnnnnnnnnnnnnnnnnnnnnnnnnnnnnnnnnnnnnnnnnnnnnnnnnnnnnnnnnnnnnnnnnnnnnnnnnnnnnnnnnnnnnnnnnnnnnnnnnnnnnnnnnnnnnnnnnnnnnnnnnnnnnnnnnnnnnnnnnnnnnnnnnnnnnnnnnnnnnnnnnnnnnnnnnnnnnnnnnnnnnnnnnnnnnnnnnnnnnnnnnnnnnnnnnnnnnnnnnnnnnnnnnnnnnnnnnnnnnnnnnnnnnnnnnnnnnnnnnnnnnnnnnnnnnnnnnnnnnnnnnnnnnnnnnnnnnnnnnnnnnnnnnnnnnnnnnnnnnnnnnnnnnnnnntatcctcttgggtggggtggccactcgcttacagtggccactcgcttaccgattacgttacatatcatggtcattcatccaagttctatcaagtttctgatttgccatcgccatgcatcacgtgaagtgggggcgtgcctcgggtggcttcttggcacggggcgtatctcattgttatgaagaaatcatttcccagggggctcattgggcagacataggggtacagaataatcatcgtgcagtccattgtcccttactactgacttactctatgcatgtcatatactctccaggtgcaatacccaccggctgatatctgcaataacaatgtctcgcccctccccacatcgatttagggtttggttgcttttacgtactacacctctccagccctacctctaatgatatccttggatatattcgcagcgttacacttgatttgacagatgacatatctagaggaatatatctggacttgggtcaatgaatcatctggtcccttgtttgctggaaatccgatacgagacaggattatgatatatattccagggcaaagtgacgttatagatgctgacgtagaatgaaaaaccaaatggtgaagacaaacatgaaagatgactagggccctaatacaatgggatctgagctgtgtctatgaatagactcgctagttccaaactttgttaatatctaagaatgaaatatgtttcactcgctagagcttgccgtttcctgatgctaagactccgagctaagcaagacacatcttctacaaaaatgtccagatcctatgatgtttccgagtttgctgaatccttagacgacccatcgataatttgcggactttgtaccgggagaggacgacagcggcttccacatctatgtttccttattgtgtttctttgcctaacatttgtttctcttcgattgatgttcatgcctaacatatagaagagtcggacctagagtgaattcttctttctgcctcatccggtggcgaggctcactttccttcggtggaggaagctaacgacgctgcagtgctcccttctgacgaacttggattcccattcacatcgaatatcttgatgaagcactcattcgacccgggcgcacagacaagaaagtgcattttaagctcgcagatagggaaatctcggctcaaatttttaacagagtcttcaagtagacacccgaccacaatcactctaagaagcaaatgggcgacgagacgattgcgaggcttgctaatattttgcttccaacgtgccagatcagggtttcagataagatatacgttagaaacgagccgagggtaagtacaacggagagacaaacgtgcattctcccaagtagaactttccgacgacatttgaaagtacctagttgaagcaccttcccctctcggcgtagaaggccttctccatatttacaaccacgaacgaggggattgccaatgtgagatttatgtataaatcaggaccgtacaagaaatgcatgtccaaacagactcaaaggagttttggctgagatatgcatatgttgtatgaaattagtatgtaggttgggttgggtggaccactggcttacacgtgtcacgtggatctaaccctatttgtggcagatctgcctggaggcttatgtctaggcccctctcaaccccgcccttgacctgcactctatggcatctatattatcccccgactgaacgggcgctacaattggcactcttggcgacctgagaaccggggaatcgcgggattaaactgcgaggctgcagcgagtttcagtctctggctcagcagggcaaaatctctccgggcaaaattccatcggatggatggtgtcggtccgacccgccttatcttatgcacgttcatgtccaacgactgtttggaaatgtggtgtctagactcgtacggcagaaattgaaagactgaaggaaagatggaaatgtgcaccgaggatgacatgagtagcagggattggctactgcaaccatcatcgaagcgtaacgcaggtctgcagtggatgtgtacgaatcaactgccgtctttaaaggagtggagcggaatgaccccaagggatgtgatgtgtctgaggtgaggtgcgttggtcatagccatcagcccaataccctttcgctgaactgcccatccccaggctagcggactgatgaccatttctctttatgctttgcccttatgctttgcccttatgcttataactcattcctgcaagcaatattaccggactgaagagaggtttcgcagcaagcagcagcaactgttcacggcggggagcggaacccgctggacagcaccgggctctgcctactgtccctcgatggcggcggcgtgcccggacgctcgaccctgtacatcctgaagggttgatggattgactgaaccagacacgccccgagggtgcacccgcaaagaaaccctgcaaggtgtttgaccttctaggcggcactagtacaggcgggtgggttgattcagtccatggtataatatcggatggcttacagatgtagattgattgcaattatattaggtcgattggggatggatgtcgatgagtgtattatggcgtacatcaagtttacgaaaattatttttgacaaaccctcaaaacggggcgtatccagcctttttggtaagattaagccccaattcgataccgacaagctcgagggtgcaaccaaagaagtcatcaatagctatagagctaagccgaccgatttattcaatcatcaagctgacccaggttgtcgggtgtaagtgtatatgagctaatggtcccgtatcctgctaacggctccaggttcgtctgcagcataacgtaggagaccagggagatcgtgcaccttcgcagctattccatacgcaacaagcctggaattccggccaccatcagccaggccgcctgcgcaacctccgccgccacaaccttcttcaagccggtgtctattggggcacgcaaattcgtggatggtacgctcggggcaaaaaccccgtggatgaagtggaagacgaaacgtctgacatctggtatgaagaaacaggcgacctgaagccgctggtggagtgctttatcttgatcggcaccggcaaccccgggaagaaggcgatggaggacaacctactcaagtttgtttctaaaaccctgccaagtctcgtcacctaaactgagtatacggagaagcgattcatcgctaaatggcgacagcattatgatagcaagcgatatttccgaatcaatgtagatcaggggttataggacattgggctggcagaatatcaggagcaaggcttgattgaagcagcaacagagggatatctcgaccaccaggcagtggcattccgagtgcgggattgtgttgagaatctgagatcaaagtagagtgtgtatttagaagattttacatagtcctggtattcttcggctaacggatacgagacgtgattgatagggagggtcgatgctggtatggatgtacaggcaatttgtgcattttatgcactttatgcactttttgaactcttgcgccaaaatgatgtcaagtctcacgatttggaaagtgggatgtgaaatgtggaggatttccctgatttccatgattttcgttccatgatctgcaccgaagacaatagatcgacaatagaggcgtatccgaaaccctgggacgagactaggctattggagtcgactattggcgaccatcaggggttaaccgcatgaccatccgacttagccgcctaccaaaccactagctgttccggttgactgcgcttggggtgaatgtggcgctcggagtattttcttttcttttgtctttgtgtgtctgacgagtattcgaaggatgtgttgttgttctacatatcggagtcggagcggcagaccgaaacccgctaattacgtatacggaggttgatcggcgttcgtccaatcgatctcggagatctcgatctgagtgaaattgcgccccggagtgtcatcgctgcttgttccgcctcgtgggtcaaagacgcggcacatgggctgattcaatacaaagtttgtctatagtgtttgtgcctcctatttttgagaaattgcgctcgcatgtttgacaccgagtcttacaatataggtaaggtccctataaaagcgccctcgcgatcttggtgacacccgtgaattgtcaaaccgtgttaaactgtcagtcgcaaacgatcagattcatgtctcagtatcttcccgagtatgtagcacatgcgaaaggtggagtccgaaaggagcccgcatgcaagtcgatcattgccagttcctgggcctttggacgtgtatccatggaacagagagtattcttagtcgaaacatcactgcccagggttcgagggggcgattacggagtttatcctccggacacgggctggtatttgtcatggagcacatcgagtgggggcctctatcgtattagagcggttctgaataacaagatctcagaatacttcgctccggcgcattgataaacgatcgatttgtcgatctgctctcagacgcgaccgcaagttccagctatggacttggtgtcgctcaaatatggatactccatagttcgtggctctagacttgactagactccacattctggcgatagctccgtgctgtgtgtgttttaggaaaaagcatccatgtgagtggataggacaagcggattggtacctgaattagtggagcagacggagttataattccaattagcgacggcaaggacgtgagcagacctcgtgggaggcgtcgatagcgcaaactcacggacaatgccacgttcttgatgtgggcgttgactattttttttaggttgcagataccgcagtaaggggtaaatgttaagattcgaagtagtatatgtacggagtatactaaggaataatagtgttatgcaaatgcatgttatatagcatgatatgtaggttagagcatacataacccctatcacaaccttggatatcacatcctacacgaagccctaaaacttcgtatccatatactccgtacttccagtatttctaatattatatgtcgatcaactctcgagagaccgtgctccactcgaaattaaatttggaataaatgaaacgctgcttttcagcctatgaggattctttaagacatcggtggagtctcccccctttaagcgcgtgaacaggaaatctttcaaactcatttgcctgttctgtactacactcgacgctttcgtacaaaaaacatccgaatcccaactgatcacgcattttggatcttttatttttaccaaatctatacatcccttccccagtcccgagtcaatccttaaacagcaaacgtttctttctatttctgggtacgttgcggttcagcccaatttcccctaaattgcagactaagtaactaatttagtggagtagattcaaccgaagcgagatacttgaaccaggaacccccccgcttacacaatttgcgcattcagtccaaccattcgcatcatacgattcatgcgcaattgaactgcgctctgtctctcccaccatgggacaccgagaactcacaccggtccatgtgccacttcgaacgtcgagtcgcaaaccggcacaacacgaaccaatgaacacccaggaacagacccgagtcgaccgacgaacctcgaaggcccaaagatttttcggaaccgatatatcacttcccacggaacatggcgggtggcaggagcctccaaatgtacaacgaccgagctttgcgaagccgaataatgctcctagacaaggcaccggtctggttccgtttccgcgttcttcagagaataccttgattcccgatcagaaccttcgcgtacgggcttcatcgcctctgctaggccaggacttccgatcccaggaggccgcgccgccgcttcccaagtcttcgaaaaaggttcaccattccggttcctcgtccacccttttctcctatttcagctcgaaagaatcggccaaatcggccaaatcgcctaaatcgcctaaatcacccaagaaccgtggactccagccgagagtacggcacgaactctccagtgagccccaagtgacatacacgaagcctcaagaatcaccgaaagaatccaagcggaagatgcgtccttcaaaaattgatctttccgtcttgttcccgaagccgcggaatccccaaccccaaacacttctgtccccccaccggatggtcaactcgccctcccctgtctcttcaatggacccggatatttcttcaaacaagattgaaaggatgaccggcggcatgagcaactccaccacgaggagatacgacgcacctccccctcgatcttcaatcaccaagaatgacctacccaaaaatggtcttgatcacttcgatttgccctcgattgcagagagcaaaagtaacgagtggttggagcaaccgcttgagcggacagtaggaacgagtgagattgatatagccctggatagatatgaggggcaacgatcactcttgagtcgctcgagcacgtatactaccagtcaagagcaattacggccagaacagcaacgcccccaggaacctcgcaagagctcaagacgtcctcacagctcctctcgacctaatgagacgtacttgagtcctccctcatgtccagacacaaaccgtggtcgcgtcgcgagtacctcccaggagtcgtggaagactaatgagtcaaaatcaaagagcgagaagagctcgttgaccaagaagggcagcaaaagtactttgaagaacaaagatctgcgaaacaccagtatgctttgcctttcctcttcttcagaggacgaggatgaggaccgaactccaaccaccgacaagcgctatacaaacaagtctagaagagacagtgtggctacttacgacgaatatgagccccagctctacacggcttctactgcccacgcgaccactgccacggcggcgaaacgctttgaccggagactctcgactagcacgcgtggctcccgccaaaccgaaaagagcctgccagtgctcgaagctcgcccacgaaaggcttctcaatcctcgaatggcaagtcttctcagaaatctggacgaaccacgcaaacccgccgttcgagcgaagttcccgctatcccagatgacattctggcgcaattcccacagcagcctctacgtacccccgcagagttgaaagagttgaaccggaggagtcgtgtgatcgccgtgacccgccaagagcaggatctcctcgaggcgatgcgtattcgaaagggcaaggtcacacccagtttgttgaatgcgcacggagcggatagaagatcgctagcctctggcccatcgcgcgattctttctgcggatccgacacctcattcttgcgtctcagccatgtattcccgccattcgatgcaccgtcagaaaagggtgctacccaatacaaagatggaacgccatcccaaagctcgggctcggatagtgaatggaaaccccgcactgcagtttcctcctctagtctcagtgtggattattccgaaagcctgccatctccttccaccagcggtgcttcgccgctgacccccactttgccaattcatcgtttctcgccgcttccctcttccaagcccccaagagggcccccaccggccatcccccaagagcagaagcagcacacccgccgtcgcaccgatagtagcgaggctatcctgctggatagtggtggtgagtcaaaacgcaacaccggccttcctctctggtctttcgactttgattggaaccaggaaagtgccaatctccctcctgtgcactgatcgcttggcccttgataccagacactctcattccatcccttgcatttcctatttcacccttctatctctctctattcctacttgaaatgaccttttacggtcttgcctgcatttccttgacttgcagcacttcgctccaagcttctctttacccaaccacatagacctcttattcctttcctacgtgacccttttgcttatgtcttctcactatttattcttttctttttggattagcgttcactcgcgggcttctgcacctgctatcatgttttacttggatggttttcgtgcctttctcacgatctcatcatttccggctcacgatcataatcattaatatccccaatgatcatcaatttatcaactgaactcatgcaattttcttgcccgattcttcacataattcctgccgcgctctagcttagcctgagtcgggtatcgcggtgtatagcggccatttgggactttgggctttcagttttcgccgctcatatatctctcttctagaatttcaaatactagggtacttggaatgttatatcaacctcctaatgggatcaccgtgtttgttgtaagtttctcatttatatagaagcaagatagttggccgcttatacaagctctttacttggcgagctaggatttgaagaatctgaacatcttgtcttgttcaatgtctttgtagatccctataaatgcccatgataaccaatcttggatatgaaatagacaatatcgacgaatgacgacatgcgaggagaataacaatggctgtgaataatgtctggctagctcgacgtcatcaacaactctcccaaaatccagtactccacacagaacattctaaatgtgatatgagatacccacaaaaggtacacagccggaattgtacacatcacttacctcacgcgacaacttccaaggtcgaacccttggtgagcagtgatccactccttgaccgccgaccttttcgtctataaccccggattattgcttgagcactctatcatcttcctctcctttcttttctaagctcttttccaagttcttcggaaccctcattcatacagtggagtcagccgacgcccattctctccttcgcctcccagccactcgcgtcgcctccgatcgccctcgggaaaccctatccggacctaaaagggaagatctccagaccagcccacccctggttcgcgagttgggatttgcagtttgctctacggaggacatcatcatacacacttttcctgtcgctgcctcaactgagcccatttaccacattcacggattggggaacatactgcgtgccccttttgcggaaacgttagccgctgtttatagggaacacgtacttcgttatgggagatcgcgctcaacgtcagcctactgggctgcgagctgcggccaatgttgcgccatggattctggtatgagcttgttggggaatacagcttttgcgatcttgggcactgttcgctgacttcgttcccttccagttgactgcggagtccactgcatttgtgctggtaagtcatcctgcgcgtgtagattcttgtgacaggaagatgagaaggctaattgtatttttacactatagctagctcactattctcgagtcatgccacccgccggtggtaaacgctacctgacctctacagcagtcttcctagtcgaagtggtcaagctggccatctccctcacaatggcactctacgacgtctccaaaaccgcaccaccctcaatgcccgccacctccctcttcttctccctcacaagcgccgtgttctcgggtgacagctggaaactcgctatccctgccgggctcgacgtcttgtccaactccctgctgtacattgcgctctcgaacctacgagctgcatcgttccaggttacattccagctgaagtttcttaccactgcggtctttggcctgatgctcctgagacggagcatccctccccgcaagtggggcctgcttttgcttctcattgtgggcgtggcgttggtgcagatccccgatgctagcccagagcaaatgttgcaggatgatcatactagccattatttccctcgatccctggaggaatggaaagctgtcaagcaaggtgctggttctggcagcagtttgcaaaagcggtctgcaacatacgagggcattgaggaggacatcctgacggctgacccacacttgaaccccacaattggtctccttgcgaccattggagcgtctttggcttctgggcttgcggggatttatttcgagaaagtcctaaaggacagctcgaaccatatatcgttgtgggtccgcaatgtgcaattagccgtctactccgtcttcccggctctcttcattgggattgtcttccgggatggcgaaaagatcgccgaagatggtttcttccagggctacaattgggcggtgtggtctaccatcatcctccaggccttgggtggtatcgtttctgcattctacgtcagccacgcgcagaaggatgcaaggagtttcgccacaactgccaacataattttgagcattgtgggaagcatctggctatttgaatttgaggtcaatgcaagcgtaagttccttgcctctcaaacacttctcttctgtttcagatgcgccctcgacatgaattatgaacaaaactgactgggacattatagttcctcctgggctcggctgcagtcctggtagcaacccactactatgggaaccccaccttcagccctgtgatgggtgccttgcgtccgcctccaatccgcatcgacgcctacgaaaaggaccccgcaggtgacgagggctcccccgtggtgccttccaatgacttctctatcaaacttccaacctcacctttcctctctgacggcatgtcgtcctcccgtcccacctcaccagcaccaggccataccagagtaagctccagccggaatgcaagcgcgaattatttcgatgagaaatgattactgtaactcgctatgcatattgctattggcccacctgacgagatgctctttacgggaaatgatattggatacttgatagatgcgggtggaagtgcggtgttcaagaaagccgcctgtcgcaagcccatttactatgcttggtgccgctcccaatttggagcgtagctactcttcgctgccaaattttgccctcttactgtcaagatgtttgccggttttggctcatgtatgcatatatacgaagcaatgaaagactttgatataccccacgatacttgaaaattgctattcttactgatttgagaagaaactgctgcagcatatgcatatgttacaaaggcatgggttcgcccacgtgctgtcacgttatcgggatgatggaccttggaaccaaggcactttcaaaattcatcaccacaaccccatattcaatcccaatcatcgagaacgcatctcaagatgcggagaaataatcagacatcgaatttcaaaccctttcaattgccttcccagaggcgcacaaatgcctcctccccgtccaagaatagtagtataaccaggatcatcaacgagaaactcatccaaggctcccagaagccacaatacagcagcccatctccccgaaagccctccagtggcctgggatcatcagctcatgatgacgacccccaattggatgcttttggtgagtctgccggcttatcatcatggcgggtgctgattgaatccagacctagaactactagcctcagaggatatagagaatcaggattcgggatttggagtttctcaatctacaccgcttcaagcatctcgccatcctgatctacagacatcccatgtctctcgtttctttcagcgtgagttgcttgtatacccgtgctagtgttcctgtcttgttgattcggaattaacaagtaatagcaagctcgagtaccgtttcttctcgctggaatgggcccggttcatcggacactgttttagggcctccctcgagcccgttggcttcgttccaccagaagaagaatgggatacggatgggacagcgcagccttgagacgaatcgtggcccataccgcaatgagactagtcaatcctcaccccagaaaccgatcgcccaggcgggctcagaggctttgactggaaacagacaacgtcaaagcctattcagcaatatcccatcctctgtgcgggggatcgtactcgtatcagtgaatgacctaccggagaactaccgctcgatgttccccttcccacttttcaatgccattcaatccaaatccttccattccgtctacaacagcaatgacaacatcgtcctatccgccccaaccggcagcggcaagacagtggtgatggaattggccatctgcagactcctgaacaccctcaaagacgaacgcttcaaagtagtctaccaagcacctaccaagtccctttgcaacgagcgctttcgagactggcactccaagttctccagcttgaacctcaagtgcgcagaactgaccggagacacggaccacatgcagctgcgcaacgtccagagtagccagattatcatcacgacccccgagaaatgggatagcatgactaggaaatggaaagatcatatgaagttgatgcagctcgtgaagctctttctcattgacgaggtacatattctgaaggagacgcgcggagctacgctcgaggctgtggtttcccggatgaagaatattggatcgaatgtgcggtttgtggctttgagtgcgactgttcctaactccgaggatattgctacctggcttgggaaggatgcgacaaaccagcatgttcctgcccaccgggagcatttcggtgaagagtttcgtcccgtcattttgaagaaggttgtctatggatatgcgtctaactcgaatgactttgcatttgataaagtctgcggttcgaagtatgtgaccttttttgttctgcctttttcctttgaattactcgttggcatactgattggagcttgaaaaggttacccgaagtgatcggaatgcattcatgccagaagcccattctgatattctgttgcacacggaactcagcgcttgcgacggcgaaagaattggctcgccttcacacattgacgaatccacctgccaggctttggaaggaacccaagaagcgcctcgaggctcataatgaggatctcaagagtatggttcagagacttactctaaagaaacacagctaattcgagatagcaacactcgctgctggtgtagcattccatcacgctggtttgggccccgctgatcgccacactgtcgagacaggctttagagacgggcatatcaacgtcatatgctgcacgtctacacttgcagttggaattaacctgccttgccacctcgtcataatcaaaaacactgtctgttggcaagatggaggctgcaaggagtattcggatctggagatgatgcagatgctgggccgcgcgggccgacctcaattcgacgatagtgcaacagcggccatcctcaccaggaaggaacgtgtaagtcactatgagaaactggttcaggggtctgagagtctggagagctgcttgcatttgaatttgattgatcatctcaacgctgagattggcttggggaatatctcggacgtcgaatcggctgtcaaatggctcgctgggacattcttgtttgttaggcttcgtcgaaatccgacgcactacaagctcaaagaaggtgcaaaccaggaagacgaggatgagttgcttcgccagatctgtgagaaggatatcgatcttcttcggaaatgcggtctgattgaagctgagagccttcgatcgacccagtttggcgacgctatggctcggtactatatccagttcgagactatgaaagttctactgtcgctgaggccacaagcgaccttgtccgagactgtgagcctattctttccgcgctgttgaaatgaagtatcttgactgacattagtccagctcaccgtgattgcacaaggcgaagaattccgcgagatccgcctcaaagccggcgagaaaccactctaccgagagatcaaccgtgatcctggcattcgcttccccatcaaagtcgacctagccctcccggcccacaaagtctcactactcattcaatctgagctaggggcaattgagtatcccgataacgagcaattacagaaacacaaattcaccttccagcaagacaaaagtctagtgttcgcgcatgtcaaccgactaatccgttgtctgatcgactgtcaaatcgcccgcggcgactcaatcgcaacccgcaatgccctggaactcgctcggagcttcggagcgaaggtctgggaccactcgcccctacaaatgaaacagatcgagcaagtgggtgttgttacagtccggaagttggctgctgctgggattaccagtatcgaaggtctggattgtgcggagcctcatcagattgagatggttcttagcaagaacccgccgttcggatcgaagttgctctcgagattgaaggagtttccgaaactgagggtttctgtgaagatgcttggaaaggtttgcaacttaatatggcgacaaatgtcattttgctaacctgggatataggaagtgaaatttaaatgtgtcaatgtccgattcaaggttgaagtcgcgttcatgaacgacaaggttccgacgttctttcaacgtcgtccggtttacgtgtgttgcatgatagagaggtctgatggccacataatcgatttcagacgcacaaggtaagatattcatccagttatctcgttataggcaaacgctgatattcttccagtgcgaataagctccaggaaaaactggaaattgaatttaccgctgacttgacgagtccggagcatgtcattatctgcgatgttatgtgtgatgagatcggtaagacctttgaacatgaacaaaaactattcgtgctgacaattatccagcggggacgtggagacaagctgagcttgaacctaacctgccatctcacatttttgctgctatacgggataagaatgccaaggcccaaattactgaaacctcgtgtcatctcaaggggaatttgaatcctaaagacgcagagaaaccaaagaccaacacgactcgtccccacggacgagatataaccagtgtcaagacaaagtcgcggtgggatgtggacgattttgatggcgatgacctccagctcgatgatttcctcgttgtggatgaacgccgtggcaaagctaaggaatctacaaagccacatcctgaacagtttgatgatatagattggttctcaatggattcaaccccaccgagcacagctaagagaataccgaaggtctcaaatccccgagaagaagactgggcggttgatatggacgagccagaggctgagtacgagccagtcagacttgcgaatggcaaatgggcttgcaaccacaaatgcaaagacaaaacaaggtttgagaatctttactttctttattgtcaagctaataacttcagctgcaaacatttctgttgccgcgagggtctggaaaagcccccgaaacccccgaaggtaccgaagcgggccgtccccgtggccccaaaagaagctggtctcaatcaaatgactatctctgcaagtatcacaaaggcaaccccaaccagtaactcgatttcgagaaacaaagtggccaaacaacgcgtcacggggtttaagaatgacgaccgtgtttcaaagcctaagaaaatgccgatgtcgcaggctgcaaagaagaatccaagtcgagagaagtctgtcctttcggagagggacaagaatccttcatataagagggattgggaaatgagtccaatgaatctcctctcgagtgactatggtgacgataacttcgacgatttaccgtctccatcacgacttctcgtaaatagcggaccagggcttagaacatcagtttctccggtggtgaatggccaggcaaagaaaaacatcacagatgttgcaatcattgaaacgaagcatatagacctcgagcctttgctctacgcttcacggtccgccgtcccgcaaaaagaccaaaccaagccatcaacccccaaacaacacgagataatcgagattctagacgacacacctccagactcaacaaaattgccaatgacgacaaaaaagaaggagtcttctgtcaagctgaacacgcttccactttcaacaaaagcagaccaagcccccgatctaaaacggaaggcgagtcaagtcgaagctcgaacagaagaccacaaaaaacgagtgaagcaaagtcccttcgtttcggctttgcagttccacacttcaaactacctgaacgatatacaaccactgaaccccgagcatcctgcgtctcctgtttctcctgtctctcctgtttctcccggtgctgctgtttctcctatgatcggcggtgggatagatttgactgcatcatttgacgacggaacagatctgcttgacgagttcaaggatattatcaaatttatctaaatgattgggaaatgctggccaagtggcggaactttttgttttccccttacgcatctctaggatttattttgcgtgctggtatgtatggtgctgggttactgaactggtgcaagttgcggctttacttttatatacactactgtgctatgctacattgacatttataattctcggcatgaaattatcctgagagaatttcgttgcattgatattctctaattttttgcaccctgaaggacggtgtagagctgtgattatagcataccaaccacaataaattaaagtttaattatctctttctgcacacatttcttgaatagtaagtacagtagttatcgtaaaaagtgtagtgtcgatctagacatccgtaacataacagcatatacatatcctagtagacattaacagtccggttgccaatatagagacgaccgggatttagggcattgtttcgcccatggtaagactgtgaatggacggaccaaagctcgcaatacatgggacttcaaactgtcccttcgttcttggcattatgaacttcgggtttgtcctcggggtagtccgtgtctgtccaggtctcccagaaacaggcacccttcttgagcgaagtgatagtctcccaaattagagtaaacacaaacaaggccatgatgattgacaacacgtcagttgcattcaggtggtcagccaggggcaaaaggatcgtgatgataccgactgcagggcgcatgatgagtcggaaaggctaggacaaacattagtgactggcgtggtgggatgcaagtaatagacggagggggcgttgacttaccttgtccaagatcaaagtccccgattcatcattggacttgtgcagcagagcaaacacgtacaaaaagatcatgcctgcacccagaccgccacaaaggagccagcgctgtggagcttcgaactctttctcggcaactgactgtgccgcaacatgtccgccagctagcagactggcaataagtggtagatgaatcagggcccaggaaaaagctgtataaaccgagtgccgcaggggtgagtggtatttaatgagccatcggcgtgggcatacagccaattcaaacagaacgcaataaccaatgtccaaacagctcgcagaaggcgtttattgagtccaactgcagcataggagccaacaataatcaaatagagaaactcgcccagcgcaatgatgtagaatgcagagaaccgatcaatttcgtgagcgatatccactgccgtcgaccacctgacgcgaaggagtttcttaccagccggcgagtagcacagaatccaaaccatggtctcaaccgagatagcgacagcagcagccgcgatcttgccgcggatcgagactgactcgaagtatagtgggatgtaaatgcatagtgacagactggaaaggacaacccagaggcgctgctgcggacggtggtggtagctggcgaaggagtagaatacgtgggcgaggttgcatgagattcgcgcgaccatgtaggatcccacggcggagcgcatggcaccgatctcctcgtcgacgagtggggcgttgttgccgtatacgaccagtacggccatgacccacagaatcaggatgcgctgtaggagatcgtcggtgtagaaggcgttcatcaactcgcgcagatcgctccaaacgttccatgatggcgccaggatcagctgtgagcgtgttagcttatctatcgcgtctgaaagtggatgggatagtggaggcgatggtggacccgatagtagaagggcggccaactcacaatatatttgaccagtttggcacctgagatgtcttcagcgagggtatcggcgaagttcgacaggatcgcgacatagagcagatcgaggaatagctcgaatcgcccggcttgtcgctcaccatcctgacggcgcatcaacttcccatcctcgaaccattgtagggcgcgtggttggtggaataagaaacgaggatttgactggggctcctcaggcgttgaggccgacatgactgtgcgatgtaaaagagatcgagcctagcaaggggattgaaaagcttaaaacgggccaatctcttggccccacagttcgtccccgcaaatcagattgcacaatttcggatatattatgtcatcaattttatacccagatcacatgaccggggaaaccatattatcatttgtcagcatatgttcggcgaacctgcttttccaaggctgttctattgttaccccgttagtttctagtaaattgcacatacttggacaattaacatcctctcaagagcttgtgctctctgtgcaaaatccgaatcatgaattcggcgaaagtttagcgaagtcgagcaatgcgaaccggcaatttgcaattccgtatctgagtactagtttgatctccttctagaacatgtggggctcggcggtatagagcattaacacccagccttttcataccattcaggcgggtaatctggcataggatgagcgggtatggggagaaaatccgtcgaatgtctcgataatctttggggtgattttgacgttttgtttcggctgaaagcaggtgagcattaaccgaggaatacctggagctccctgagacttacaagggatacttttggatgttcctccacgcacacagaatagcctctttctgcgccatttcatgatctgataaaggatccacagactccaagagaagggaattgaagcttccatcttttccatcaaatatccactgcatgcagaactcaaacaatcttgggtagaagcccgcagatgcccaatcaataaggcacaaggagccatcttcctgccatatgatgtttcgaggtacaatatccagatgacagagcacgagatcacagccctgtaaatctaagttcgggttatgcgcaaaaagccggctattgaaccactcctctatccggctaagactgtcgaaaaccaggtcttctgtttgagggaatagaaggccacgacaagcgcctctataaagtgatccagggatattatacctcaatgttgcgaaatgccccagcatgctggcaaccctctgtatagcgctaacgtcctctaaaggatcgatgacctttccttctataaattccatcacaatataaccccagtcttgctcgtcagcaaaaaaaatcataaacacgtgggatacgagctatgcggctgtccacaagctcataagctatcctttgattttcaaattcttctcttatcacatctgggccgcatttaacgacttgatgatcagagattctgataattcgtttgctgtattggctaacaacgttgccaggcaacgggtttgcgcaagaagcgatcactgaggctcgttgcgagtcttcgggacgcgacattcttttagaatggaagactaattgggagtaaaatatcataggacaacccaggtctggggattcaaattagttataaagatgataagagaatgtcttgtcttgttggaaataagaaatataacttggcgcggagcggggtaaaaaggggccgaagaatgttatggtagcccccgtttgtgaaaatctggaaagcgcgagtaaggagcggtgtaaagtagagatgcaactcgccgctaagtttgcttgttaatatggcgcctgggagcattgctaaaactatcattaggtacacagctaagagttcagggtccgtcaacggtagtgagaatgtgaggacagtcgttcagaaaatttcctagaggaccaattaacggctttcgcctatcaaatggaattttcgttcttaaaggattctttttgtttcattgcggtagtgaaatgtatgcctaggtgtatatacgtacatgcatgaatctcctactgtggcacgtgctacaccacgtgcagtacccggtattcggcccgccccggagagccgcaccgccttgcgggtactgcctctaggtacccaccgccctcaggggggtataagaaggtggccctgcccccggaacttccttttcttttctttcttcttcagctctctttgcctctggcttagatcaagtgtagtatctgttctattcagtttaatcgctgaatgttctgcattgcagaacgtcatgattatactaatttttggacctcgcgacttggcctctgtgcttgcatacgcctcgttgcactgtgtcactgggcttacactaccctcggtcgatgcgaaccctcttttttttcattaatcattcggcttgtccgggtgtttgaagaagaaagctgtagaagttccatcatgaaaccccgtatgcctctcgtatcaacgcgcccatcatcgactaacagatgcctttctctcacaatatgccagctagctgtgtcatatacctgtgcaagtccttacttgcaaacgaaccgtttcccattctctcctttgacgcactccataccgtgagcaacccgcttctcgacacggtcggcctctccatcgacgaattccacaccatcattaatttaatctcgacacagtcggtaccctccttcaacacatatcccactacacttccctgaactatcacccccacaatctgctactcgcgcagtcaactcccttcatacatcgcacaatgtcttcttcttctagcagctttgccaaactaaagctcctagaaatcattcgtcttagcccctactagcgaaaacaccttctctttgtggtcggccacatactcgtgtacactttcaacactcgtgaccctcaccctttcgagctccttgccagcaaacacaacttccgaaaacctgacagcttccgagtgaacatgtatctctcagcacctgtcgtgcactcgcggtacaatccatgcatctcataaaccttacaccaagatctcgcctgacgctaacgtcgcttcccagagtctttacaagagccttcatacttacagtcccggtctcgagaagtttcatagctcccacccacctcccctccacttggaagaccaatattaaaaagaagctaggtcttgtactacgccctataccgtcgggaccaccgccagtgcaaacagcctgcctatattcaattagaatttttgccatagactggctgggataagcaggccatcatggattaccaggaaatgtccgctggtcgtcattatcttgactccactaagtttcctatatcttatacctagaatcacatatatcatttcctttaattcaatagttctaataccagagatcttgcactgcattttctagcagacattatatctttacatctgtagatatataatgtcattgtcaccggcgacttcatttgccctaatagccaaagttaaataacaataaaggtctacaatttatgcggtacaatgtcagactccaactgctttgtgtttttgatgtcagattctgtgtctattacccagcgtaaatcaactcatgttacatcatggcaccttgacgtctctcagatctcccctaccacaagatctttccagatgacccacaatatacattattgccttgaagctatattctacaaacactgcgatgtatgtctaagcataatcctattctcaaattcttagtaagatagacgagaggacaactagtattgtaacacacacatgcttttctttctctgtacattcaacaaaggatttgtatatcgtggagccgaatcatccaatagatgcgggttcactgggaagatagcccagagccgatgtcgataacattatgtgagaatcgtgttgattaatggaatatacatcgactgggactgggaggttcgacacgctcctgcctaattgcggtgttgttctaccttagacattaggcataaactttttgtcggagtcaaccgtatgtgtaataatgggggtccaatcaatggtgtaaaatcgtctgaattgtcaagttcgtcccccgcgcggtgcgttggctgacgagagatgagaggcattgtttcgggcgagaggtgatgtttttggttggggctcccgatgctatttatcgtcgccatgaccttacagtagaattcgaaaacagactactccgtaccccttggacacacgctttctttcccggcgccccgctctgactgcactgaacctaatccagtaggagttggtctccaccaccttttgtccatgtatttctggtagatcgtcaaaattacggtgattacactttccggcattggacagacccgccttgccggctaaatgactcgagtaagctaagcggtcatgtggttttgcagcccagcaataaatcgtcccgccctagtgtgacgtcgactcaatttccctaacctatacctctctatgtagcatacgaagcgtattaataaaaccatactattttcgtgcggcagttattcgttatatctgccccgcctaacactctaaaggagcctacttgtataatacgcttgtcgggattgtcttaagctgtgactaagggcaaaatttggggataaaatagtaaagaaggaaaaagccaagtagggattcgatgtaagggtatatcggttgcctaatcttaattagaaatggtggtggtggttaaaatagtaatagaagttgtattgaaaacgagttgcgttgacggccggctgacctacccctgactaactaactaacgttaactatgtgataaagacgaggaaaggtatggtcacagtctggatcgtaagtggcttgaacagatattgtgagtaaaaacggagtcacgttcaacacggtgttgttgtttgtacggtggtcaatagctctaattttcttcggaatagattggaggaaagtggcgactagaacttcagctgaactgcggatatcttggaagagcaggaatgatgtgcggtttatatctacgtcatgcactgcagaactcagcgggttcgcttagggttagagcgatcaccatctcctcgggagggccgaacgccgcgaggaagaagaaactgtgggtcgtccgtccaatgaaatcatgatcggcatacaccttgccccttctagatgccaatttaggttgagttcttgccaagatcgtcaatactactgatcagatcttccgcccgtgtacagtagcactgcgcacattgcttcatacttcggagttattcgaaatcaaatttatcgatatctcggcaagttgcaaatttcactgatgacgtagagaaggacgatcagaccattttcatggctcagctgaaaatctaagctgagaacggaagctgagccgcccagatctgtctataaattaagctttatacccctctctcccactccagcatctaccatccttatcataaggtcgaaaaccacaagactcaatctaattcaatccaagccccaagcctaatcctctcaaaatgccagtccaaattgtgcaagagtacgcctgcttttcacctcaactccctgcttatacgactaaccctcatttcttcttttagccccgaggaagttttcgaagctattacggagagcctaaagccagttgttgtgcattactgggctccttggatggggggagagtcgccatttatgcctgttttcttgggggcggatgaaaatcgtgggggggaagagattgattttgtcattgtggatagtggatttattcatcccgcgcatagtccagatgagatgcccttaacggttctctatcatggcggtgaagaggtagattctgctccgtttgatcccgaagcagttgaagcactcattgagggagtataaagagctggaaattgggataatattatgctaggtaatatcattggtatattgatttatgacagcttatggctggagtggtgatttgacgcttagttaacaatactattaaggtgtgaagaggaaagatggtaagatatgatatgattggcacaataaactgtaagatagtatatacgtgaataagatagaaataaagaatgaaagtagatacgaaccactacttttgtgattcctttgactatcattctagaataatagtcttaaactctggggaagcctctaacccattatttgaaaagatctcttatttgatattgactcgtttttcaaaataatcccggttcttcgaaggtatgttagctttgctggaaaccccatcttaagtaaagctggtaatgaatgagacgcgcgtaagatagcgagattcacggagatactaaaaacatgcgtccctaccaggtctagctgtctacaccgtaagcacagtcttctaattataactactatagctgtggcaaacattgagtgcgggatggatggatcgatgattttattcactttgatctcgcgaacgggtgccatggtgcatactgtattgtatgaccacgggcgattcggcaaaggtggtttgtccaatgccggaaagtgtaattaccgtaattttgacgatctaccagaaatacatcgacaaaaggtggtggagaccaactcctacaggcattatccggtatatatgcgaatacgaatataagcgggagcgggcgggagcacgtgcctatagccgacacgtgctcctaggtaaaaattacgtcccgatccgcagagccgcactgtaccgcctttaagggtattgcccccgaatacccaccgcccttgggggtatatagcgaggccttcgggcacgagccctcttcctcttttctttcttcctcagctctctttgcctctggcttagatcatgtgtagtatctgttcttaccagtttaatcgctggtagttctgcattgcagaatgtcatgattattccaatatttggacctcgcgacttggcctctgtgcttgcatacgcctcgttgcacagtgtccctgggcttacactacccctggtcgacgcgaaccctctttttttcatcaactactcggcttgtccgggtatttggagaagaaatccatcgtccaataccccttctgatcttgttgtggagttcctttatgtgtcttgcccctctgcctctgggtcctctctaggcgttgcagactggataatacgagctctacgatggtctgtctactgattctctagactttctgatcttgatttccatgtctcttcgcttggcctcattctagtacccgtgggtcttcgcagggacccaccttggcgatagggaataattccctgcccggtcgcaatcgtcgcccgtaagagatttcacgtgccagtccaaccccgggtcatcatcgtcgcttccatggtccatttccttctttgattcctcgaaagttcttttgattcttcgtgtgttcttcgtgtcaaatatggtccgagccaagcgccaaaacactcagcctttggaggattcctctgtggcccccgaaaccttcaccgacggcctacccctcccgaagttgatcgccttcgacctagactacacactgtggccgttctgggtagacacacatgtcagcgcccctgtgaaggcccgcgaccacaactcgcgcgccgtcgaccggtacgacaaatcccccgattgacattatcttttgaaactactcagatctctaaccccgcattccttgtctcaaacagatggggagagtccttcgccttctatccggcggtgtcgtcaatagtctacgcatgcaaacatcgctcgattccactagcccttgcatcccgaacccaggcccccgatctggcgcgcgacatgctcaaatccttgcatatcatccccactttctccgataaccccgccgcgaacgctaagaccattcgcgccctcgattactttgattttatccagatctaccccgggaataagacatcgcatttctcgagaatccaacagacaagcagtgttgcttatgaggatatgctgttcttcgatgatgaggcacggaaccggaacgtcgagacggagttgggtgtcacattttgcttggtgcgcgatggggtgaccagggaggaggtcgaccggggtgtgagagcttggagaaagcgtaatggtatcaagcgagataccatggaggaatcatgaggatccttgatcgtcttatccgatgattcctacattgggggatgttgcgctgtacacttggtttgagattttagataccccgacttggaatttatgagaaattcggctttttatgcttcacagcaatccttcagtaccgatttgaatagagtaacattcaaagtacatcgtatacttcgacctatccatggatggagccatgcgtccagacattttgttgagctgactaagatattcacccccaaaggcggcgcgatgcagctccaaaacaggaacaccgtgctgtcataactagatctcctcgaaacacacctcctccaacacaaaccaccaacatggcgaccctcagacctccaacaaacacccaccgctcctcatcctcccacagctccggtccaccaaaagcccccctaaaagccgacccaacagcgacaatcgccgacacggtcatcttccaagggcgatacctcgtcactatcggcgcagggacagtcatccacccgcgcgcgaaattctactcatacgacggcccaatcgtcgtcgaggacggctgtataatctgcgagaaagcggtaatcggcgctccgccaagctcatctcgctcaccgtcaccgtccagaccagcaagcacaacacccaccgagtctagggtgtcgacgcctgagcctaagaaagagacatcgacgcggatatcatactttgttactgtcggcccgttggcgacggtcgaacccggtgctcatatccattcttctgctacaatcgaggctctggcggtgattcgccggggtgcggatatcggtgcgcactcgaaggtgtgttctgggtgtgaaattgccgctgggggatcagttgctgagtgggtggttgtatatgggcagggcccgggaatgcggaggaagagagctcgtggtgtgaagggggtgagtccggctgttgttgctgcggcgcaggttgcacagacgcctcttcctggtcctgcgccggcgggcaaggttattgaggatgcgaggttgatggttttgcagaaggagagggagatacttgggagaatgcttgttcctgctgctgggaggaagaagtgatttcaaggtgcctcgtcgatatttttttttgttttgaacttgcgttcttctgtatcggaccagatttcttggattcgtgtcttctagcagcttataccccagtttgtgtttacagtggttagtatatcggaggtcgttacaaggatggtgcacgaaatacctcgcaattgaactatatcaattgagagtaggaatataaacccgtaggaacgccacacattcagtagataaatacaggacaacaaaaaaaaaaaaaaaaaacaaaatagctttctgcatagcagattataacatgaaaaacaatacaccatgcggaataagcagacatagaaacccattcatcgacaggttcccgtcgcatttgaatgaaattgagaatacatcaatgagatagaaaaagatggacaatgaatgctgcctaagacgaggctccaccacgagcctgagggccaccgccgcctctctgtctttttccaccacttccaccatcggtggtagtgtcggggccatcatcacgagagcgcttgttgcccgccggaatgaactgacgagctgaagcactcagattcccacggttagcagtggggctttgagcctgagcgacgttattttgattctggttaccaccgcgaccttgtccgccacgaccgccacgaccgcgctggaggccctggccgcgctggttttggccctgaccaccttgctgctgctgttggtcatgttgttgatggccgaattgctggttaccacctcgaccacctcgtccacctcgtgcaatcggaagtccagactgaagagcgcgcatcagaccaggcgggtttccggcgggaggtttgctgggaagagaagaggcatgctgattttgatcgggttgctgaacttggccgaacggattggctggcgttgcgggctgtgtcccaccttgctgggggacagcaggtccagaagacgcagttggaggcgcggcttgctccggggctcctaccacagggactgaggcaggaacggaggcaggggccggggccgaaaccgggacttgtggcgctgctagtgttggagcaggaccagcgggttggactggtacaggtggcttagcagccggaactgcaattggtgcaggccgagcagtctttgcaatttcccaaacttccacaacaggcttttgtggggtctctgtggcagcttttgataccacatcaatcttggcattcgcagttcggaacctggtgtcaagcatgctgagacgggcggctgttttcttttcgacaagttcgactgccgagttgaccttctccttgagttcattctcatgggccttgatcaatgcctccttttcctcggtcgacttctgctgtagtccagccaatgcggcttcattagcaccggaggaggcttgagcttcttgttggagtttttgttgttcgcgtgccacttgaccgcggatgttgtttcggacgattgtgcgaatagtctcatgcttcgcgaccagctctcttgcttgagcatctgtcaactcaggaatagtaaacccggcaagctcaaacgtctttgacggcgttgcaggggttgcatccggggccgcacctggtgttccaggtatggattgttcaccggcggacagtttctcaatttcttgacgatgagcagccttaacttcgttcagcttagagttgtacatatccttaaggcggtcagcgcgttccttgaccttcgcatcttgttcactagcctgtgtcgctagaagtccatccttctcggcaagagctgcctcgagtcgctgtatcttctgctccagggcttgtatcctttgaatgtcactaggaccagggatttgaactgtcgcggttgggaattgtgaagctggggtagcgttgacgggagcttcttgttcggcagctggagcaggagcaggagcaggagtaggaataggagtaggtgacacattggctggcgcctctgccaccttggttttcaacgcctccaattcgttctttgtagtctgaagttccaattggatgacctctttctcctgcaacgccacattgagctcatcctgcttggccttgacacgcgcgctaaggtccttagagcgtgccttgaattgctctgtgagcttggatcgcaagtcttgcgcacgttcatcagaatgctgcttgagctgctctgggaactgggcgatttgagcctgaagtgactccatctgggtttggagagcttcccgctcggacacggcctcgttcttctccttctcgagactcgagagcttctccttcaactcttgcatctcagtaggatcgacgcggtcgtacttttgaaggatattttgaatacgttgttggtatcggtcacgatcggcctgtagaagctgcatttctccatccttggcttcactctggctctccaactcgtggatcctggtcttgaggggttcgatctcctggaccagttcattctcgcgggcgatcttttgatcacgtacggcctcggtttgtttcagttggtttctgagagtggcgttgctttcacggaaaacgttgagctcattgatagtatccaacagcttactgtgattcaacgcgttgtgatcgctgtcggccgcagcacggcgctgctgctcaagcttcaaccgggtctcatcaagctgcgactgagtgtagtcgagctgctggttgaggcgcttgctttcctgggtcgacaggtggtattgaacctcgacaatttctttctcgcgacgcaagaacttgataacctcctggaggccctcgaggttgggggcggcctggtctccctctgcctcatcgtctgaaacattcattcggtcccgctgtaaggacgaaatctggctggtgatgttttcaagctgcgtgtgaagcacagaattctggtgaagaacctcctcccgacgcttctgcaattcagaaagctcaccctcgtacgtggctcgctgttccgcccagctttcctccttctgagacagatctgttttgtagccctcagattgggttcgcagctcagcaatgtcgagcctgagctggttgctctctgcacgaacaacttgtagattcttcgctgcctcggcgtgcttaacaagctcggtctcatagttttgttgggcatgcttggcgatttcggcctgcgcattaaggtcctcctgatggtattgcgcagcagtgacatgtcgttcattgtcggccttgagacgagtaatttccgactcgaagttggccttctgctcttccaggcggcgggttgcctccgcttgctcttcgcggagcttggtcatttcagtgttagaggtggacagttcagctgagatttcctcaatgcgagtttcgaggtcctgaatcttagtattcttctcctccacgagtcgatcagtctcttcgcggtattgttcctgggtctcggtggcagactctagacgttcttcactggcttggctgatggcctggtagtcttcggccagttgcttggcgtgttctagctcgcccttggccaattctaggtcccgtttcagttcggagacttcgattgaaagttcctgctcgcgagaaaggccacttccttcaccagactcctgatcctcggtaggaccctcggtggtgccggcagacacgcttggtcgcgaattcacgacctgcagacgctcttcggcgctcttgagctcgactgcaagctcatccacgcgggattgtaagtgatcccgggtagtcttcgcagcaaccagctcttcgcggactgcacccaagctggtgaccaaatcgtcaattcgtttttgtgatgtctcctgctcgtactcccggcgcatgctggccttcttagattcctcaacttcatcattgagcttgcgctttgtcgattgcagttcgctttcgagggactcgacgttggcttggagtcgacgtcggctctcggagtcgctatgttcacgctcgttgagaatggtttgcaggtttgcgttcaatgagtctagacgaccgcgctcgttacgcaaattttcggtatcatcgatgagcctcttctcgatattcttccaaagggccttctcggccttcagattggcattttctctctgaaggctctcaacaagacccttagcttccacaaggtcttcagcagcttgctgggtgcggagatcctgtcggtttgcattttcgaagagagaagaataccgcttctggatttcaacgttctcattcttgagcatagtgaagttactctgcaaaagctccgcacgttgggaagcagcagcaagttggctgtttgaccgactgatgtcagacataagctcactgttcttacgtgacagctcattgacctgttgccgcagtgctttgtggtctgttgtcgtttcttcacggaaagtgtcgaaatgggcttgaacttttcggagcaactcagcgtagtcgggtcctgaagtgtccatggctccttggggagcagtaccaagaggcatggattgtgagaagacagacgggtcgtcgatggttggctttctgtgcatgagcatactgcggaatgtgtcacgctccttgacgtaactttgcatctgtgcgctgagattcgcaatctcatcacggtttgtctgcgcacggatccgtaactccttcaactcgtcgagttctgcacgtcgcgtagcttccttcgcttgtgcctcttcaccctcctgcttatcaccaagttctctcaacatacggcggagagtgtggttttgatcttgtagttcgtgaagatctttgaaagttgtgaggtgcttgctgataaagcgaccagtttcattgagatccttcgctgactcctcgacttcaccccgagcaattttctcaagctcctcgcggtcgtattcttcgccatgttttgcgacagcaacttctaggacaagaaccttgacttccgcactcagatcgcgaagttgctggcgaaggatatccccctcgcgagctaggccctcgacttgcccttgccatttcctggcttccttgagggcggtatcccgttccttcccggccgcttcgaggagagtagacatttccacaacagcatggtcgagacgcatttgttctgctcgtccctcctcaatttcgggtctggttgaatcaagttcaagaaccatctcgtcaacggtattccggagctcctggcaggttctctgctcagctgcaagagcggtgcgcattctgtcgtactcggagtacatctgtgtgacattcataccacccttaccacgagatgtccgaggggagaacgagccagtgggagtgccagcacgcatgatgcttgatcgtagaggtgtactaggtgcacctccattaagagagacagcggggcttgctgaccttcctctggcaggttcaaactcaagctgggcaacaagtgcctcgagttcggcaattcggcgctcagcagctcccttgtcgttggactccgtctcaagctccacacggaggcgtgagatttcctgtgctgcgtcatcctttgtcttttcgagagctagttgacattcttgcacccgttgcttggccgtctgggcagcagatccttgtagctcggccaatcggttggagctgtcaagttcaatgcggaaggattcagttgcctggatggcttcctctttcaactgatgaatgctggccagagaagtttcgtatcgctgctctgtttcgtccaagcgactcttgagcgaattctcacttcttcgaagagagtcaattgtcgagtttgcttcttcattttcacgctgaagctccgagatccgagctcccttttctttgcggaacttgatgtattcggcggattttgttttcagttcggtctcgaaccattcgttgttctttttagtgagatccagttcttgttgaaggctctgttcgcggaaacgcgcgctggcagatgcggcattggcactctggagactttgctccgcggtggagagttcacgtcgtaattcgatggtcttcttgtgctgaagcgaaagctcctctgccaatttatcataggccgcagatttcgattcgagcaagcccaatgtgtctctgttggacgcctccaaagatgatatacgcgctttcaaagatgtagtttcggattcgttagacgtggacgaggatttcagtgtagaaatttctgtctctagtgaggaacgcgtagtttctattcaatgttagagaaaagctcgtcagtactgaaaaatatagagatatgtaccagcttcatgcagctttttcctcagatctgcgacctccgcgtgtcccttctccacgctagctttcagaaccttgaccttcgactcattgctgcgcacagaattttcaagctctacctccaagcgaagcttgtcggacttgagctcgtcggattcatgggcctttttattgattgattctaaaagttgattgacaagctccacagttggggcctgccttagggtcgtgagagtcgattcgggaagcgcatagtgggatgataggtagggtagttgaatggcagtttcagccatgttgtcaaacgaggaacagcactgagctgtcgtggcgaagaaatcaagaaaagcaagtatgagcggccctcgaggactggcgcgccgtgtactgttcagagacaactacacacagcgctgggcgagagacctcaggtcatgacgatgtggacaaactagatgtgtgtcttccgagggagaaaacgaaggattgaatgatatagtaattggaagaaatggtggtgagatgacttcaagggcttccgagatccatttccgcgccttggggtgctgagctcttgcacgtgacattctttgtctcgccttcaatcttttaatagccactctcatcgaagcttcactacttgtctaggctgtcctcattctctacgcagctctttttgggtgtattctcttcttttctttcggataatacttaccaccggtacctttgccaagccctgtttgaatcctccagctcgatctggtcaaaccgagtggctaccacctcagctctgtcccattctccccttgaatttcagcgatctccaatccttcgtcgcaaccatgtcgtaccttcagaatcagctcaaaagcttcaacgccagtgtcgtggaatcggcaaaccgcatgcctacgcagcggcgtgtggtcagtaaccaaccgatctctggcagcagttctcaggtcccatcgtccacaccgaccccttcatccactaccgaggtcaaaaagaagcgtcatgacccggacatcgtctactctcaaccggccaatacaggcacgggcaaagatatcatgacgcaggtgctgtttgcgatcgagcacatgaagaacaagaacattccgctcaggttctcggatatcatttcatacctctcactccagcatcgtgctcatgaccagggctacgtgcaggctcttcggagcattttgcagatgcatgagaaggttgagtttgacccgagcggcgcgaacggcgagggcacattcaggttccgcccacctcacaacatccgcaactcggagcaacttctgaaattcctccaagcccagactactgcggcgggtatgagtgttcgcgaacttagggagggctggcctaccgtcgaagaagagatcaaccaaatggagaaggagggaaaactactcgtgactcgaaacaagaaggatgagcatcccaagatggtgtggcctaatgacccgtctctaattgaacacttcgacgatgagttcaagcagatttgggacaagatcaaagtcccagatgtgaatgtagtgaaggaagagttggacaagttcggcatcacacccaccaacaagaacaaggtgctcggtccccgggtgattgcgccgtctaagaagtccaagaagccacgtcgaagtggcaagaccaccaacactcatatgacgagcattctgagggactactcgcatcttaaacggtaagtcagcaagggtctcactttactgttgtcacatcagaagttgccttgatattatcgtgctttgcattgctttggcgtttgggagaaatgcatgcggcctcattctcaccgcatagaaactggtttattactttgacatttgcttcgacagcattgacatttgtacactacacacgtagaaaatgatagatacccaaataaaaaaattaattgattccttacaaccctagctacctcagattccaaagtttcttcatgtacccagttagtccaccatctctctaccctcatgctctcacccgaagacacaagtctataacccgaatatatgcatcaattcatccaaaaaatgtatccaagagaaggcgtagtgatgtacaaggtaccccaaagcacacgacccaacaaaagcgatctgaatataacaacccgaagatcaaatgcaagcccccaatcattgcttcccattcgcagcggcaccagtaccgtcacgacgatccaagtacaccaccaaatcctcaatagtacacaccttaatcccccacttctttccaaatcgcaagcatccatcccgacgcatcatgccattattccccccaatctccgcgacgccctcgacagtctccccgtcctcaacaagctcggcaataacaccagccggcgccttaccagcaagcttgcagaactccaccgcggcctcggtgtgacccgtgcgctcgcgcacgccgcccggacgcgcctgcagcgggatgatatggcctggccggcggaaggagtcgacctgtgccgtgggcgaggcgagcgtgcggcacgtcagtgcgcggtccccggcggagattcctgtcgtcacggattcgtcgctcgagtcgatcgtgactgtgtacgcggtgcacttcgggtcggcgttctcggttaccatttgtgggagcgcgaggcgggtggcgaggtccggggtgatcggggcgcatattaaaccgctgtgttttagaattgtcagcaaggtttttggggtggcttcaagtttgcgcgtttgtctttgagggtgcgctattgcggggagggaagacgggtttcgtcgctgtcttgatcgggtgggtttcgtacctcgaatagcgcaccaggaaggccatctgggcggctgtgatggactcggcggcaacaattaggtcgccctcgttttcacgatcttgcgaatcgagcacaatgatgaattcgccattctctagtgtagggctccgttagtcgtttggtcgttatttggtctagtcggaaggcgccacgagtactgcatgctcgttgtgcatgctcgttgtggtgaaatcggtttctctgtaaagagttcacttactaaatgctgcaattgagtcctcaatcgagtcgaattggtgtgcgatttctgttggtgaaggcattttgatttatttttgcccctcactgcggaatttcaaggatgggtagtttgagatgcacggggttgcaggcaatatgaataagaagaggtcgaacaattgatcaagaaaagtaatattcggattggcctagaatcaagaaagaagaagaagactgaagactgagtcactggctgacaagaacattagaaatgcccgtgatgtcggcgcgggggagccgaaacgcggaccgggcgattgctaagcctcggagctccgaggtctatgaatgtcgttaaatccgagtttcttcccaaattgtagcatattccatagattactgcccagatattggcatatactcgtgtttccgacacatcagcccactagaactgggtatccggatgcagcgggtgtagagaaactacaagccaaaactttgactccccatccagcggacctcatccgcctgcctctcaagcgcacggcgcatataatccccataccgctgctctttctcccaatcatcacgccgtctatgtcgcatctgttcacgtgtagcttcatcgacctccgcatgcataaatacatcatcatcctcgtcaactgctttatcatctgtctccatctcataatccgccggaatagaaaatctgagacgaccaatgcgctctccagtccagataaggagctcatcaccagtaagatccccaccagtaggaagaatcttgcgagctacctcgttattccccgtcgattgggagtgccagagcccacgcggctgctggtcttcttctgtctgtggagttggctgttggctgccctgaccgaatggtatataaggctttgagttattgatattccagcgccggacttctgaacgaccgtctcgctctgtccacttgatgttgccctcggcgtcggaaaagacgatccgattcccatgcgaccccacggaaagtagtttggaactcgcggcgctttggcggttcttgtattctgggttgagggtggatgtcatgttcgaggggctgtggtctttttcgggtgctgatttgagattatagagttccagcgagcctcgtccgttatagtctccgcatgctacgacagaatgtgactcagggtagatggaattcgagaagaccgggaatcgaggcgctggtaccgaggcaagactacatagtcggccgccggaatggactgtggtctgtagctgagggaagtagcggcggtcataacataggatgctggggaagcgccctgcaaggagaattgtattcacatgaggagctggcggatgcaggatagaaagagggccaggttggaagaggggcgcgtagttggctcctttatctaagggttctggactgcgtatgcgagtaggtgactgtccgttggattgcagttggcgtaagggcgaatcagagtgggcaaagatgcctagtcgggaagcgtatggcccggctacctgctcgcatcgcaagctgattgcctcttcctcctcgacggctgacagtctggagtcatagatctgcaggctgagtgtagtggctagtgtcaatggcactgagtaatccgtctcctgagaaagggcaaagatcgaccagggatagcgctgctgcgaaatcacttttaatgtttccaagtcaacttcattgaggacattcccaactgccagatacgctctttgtcgcagagaatccacgctcactccctcgcctagatttataaattccagcgaagtcttggagggggaatgatctcgacgaccagacaggctggccatgagaattccgggctcactgatcccaaggatcttgcctttacttgctcgagagtcagctgagtgtgaattattcaggtcccagatgcagacgctgccatcttcaagcggggcaatgatcttgttctgactggctgaactccagtctttgagtagtcccatgcctttggcctcataggactggcctcgtttcccttcacttttgcggaccgagggctgctcaacccaggataaacatatgggcccgtgacgagcaatgtattccgaataccagtccacatgctccccctcggttgatgagtcccattccgctgccgccctcgccctttcaaaccaagaccattcctcatcagagtctccgttcaccggcggagcagagggctgaataatatcaagcagcgactcctgccccagggtcgtcaatgagacaggagcatcgcaaatcagactctccgaggatctggcagcggagcgggcagcctgccgagcagcctgtcgagcagcccatgactgctcatagcagtgcaatctccattgagtattatcgcgggcgaggtcaaagaattttttggaggtggactgaaggttgaccttttcgcgtggagcgaggtctgtttatcgccgagttatcagttctccgtcgaaatggtgcggggaaggtccggggcttacggtcgatgattttagacagaatctctaccggcagcttatccatggagagggatcaagagcattgagggcagtctcaggaggtaaagtcagccacagggatatcggccttttgttggagattctagactcttttcctgtcggctttcctccgcaatctgcgctccagaccagaccgtcacgcggattcaattcgcatgggacgaacgactggactagatgcagaattgatcgaagtacatgtacgtatgagaatggtctttcatacactgagtgatgacgtctggagggcgctgttgagataacttcagacccgggagacttttccgggtatgggatccactggattttatagaatgactctggagaaagggagaacattctgatatattccacggcacagccacctctcgacaacgatgttaaactaagaaaatgcttatcgttgacatggcagtacgcactcgtgttgttatatgtggaaaatacggaatatccttgccaaacagatcaagatacgttaatatattgttgaagcatatccatccatcttggaaatagaaagtatttgaatgatctgaggccaaactccagcccagcccaatttcccccaccatcaatcagtcataactcgtatatttgagataaattatgtaggcaaaagcattaaacaaacagaagatgacggtctatagaggcaagtagagacacctctactcatccggtctaaagacggcatctttgcaaaggatcaccacctttttaaagaaacgtcgccattcaagcggatcacctttgattttgacgaattccgcttcaaataacccctctgagacacactcaatgagcactttaccctggagtggacacatcctaccatccttggcaatcacccgaatcatggcagaagtatctccagaaccaacagcagggacaatcggaactggaacccccagtcggtggaatgcctcacaaatgagaggcacgagaagcttgagctcccatgcagaatagaaacgtgtcattgaacgcgaagggataatatcctggaacctttgtgcgttttgagttcggctcataggcactgaaggctgctgtgagaactgcgacatagaaggctcatcttcgaggtggcccgccagtgctgcatcctgagaggcaaacttcttcccaaacggctgggttgaagaaaagacatcaccattctgtggactgtcccagtccatcaacataccaccgcccagcatctctggctgtgtcgaggagaagcctgaagttgcgccgcagtcatccacatccataggatcaaagctgcgactcgaacccttcccagatcgggaaagagggtcttgactgaagtcgatatgaagcgattcaaacatcgaggtggcaagattaattgtatctctcaacttgccatcggtcgagaggtatttgtttgcacgagtgtaccaaggatgtcttcggacatcctctagcgagaatcgttttcggggattcactgtcaacatgccacgcagtagtgataatgtagcgggtggtaacttctgccagagctcatcggtggtccgcgactttgttgcaacatattcgtgatactcaaagctatcgtctgtcgggctatcccacggcgtgtttccggccaataggacgaaaagaacgatgccacaagaccaaatgtcagctaggtccgggtgatacccagctcctttgttctgaccccgactactgctgctaattacctcgggtgcaatatatggagggctgccacagaacgtggtggagagtttccgcgttcctttgtattcgaacagcgccgccaaaccgaagtctgcgatcttgagattaccgtcgccggtcaaaagcatgttctcgggcttgatatcccgatgaccgacgcccttggagtgcatgaagctcaccgcgctgataagctgggagaaatagacatgcgcaacatcctcgcccacgccctcgtcggcctcaatcttatcaaaaagatctccaccttcggccaattccattgcgatccaacgccacacctcatcctcgcctgtctgatagaagctgataatattcccatgacctgagacatgtctgtgtaccgtgacttccagttgtaattgtcttgcgctaattttcccatgtcgcgcggcgtaatctttgtggatgtacttgacggcgaaaacggggttgtctgaatccaacgggcaggctttcttaatgctagatagattcaaccgagttagatctagtgcttaccatggatctcgttcttaccatgcataggcaccttggccgatagtcttggacacgatgcgaaacggcacatcgttcgggagcggggccagctgcgaatgttgcattgcgaggaagctggcagggatttgagtggatgcgatcggatggaacggtgaaaacacgaaaggacaggaagtaaattaagattaaaaaggcataacgagtgggaaacaaaataagatgagatgtcgcgtcgaagcaagggtagcgagacgcgggataagacgcggaccactttatcctgatcgggtagtctgttgacaacattggaaagtcacaatacaagagggcgagggagggaatagcttcactttgtctggtatgagacggctctatactgcatgtgcaactatacaatgctctattattatactacgatatgctattaataccttgagcctgcagacccgcagttgatttgacgatcgcactaatttctagtcgattgtttgcttatattttgaactgtccttgtccttatatccagttaatatgactttgattctatattatcgagtataaatagagataccttcctctcaagagccctagggtgcatagagtgcacatgtaaaattcacctaagcggggttcgcgttgcccggggcgtcttaagcgccgagtaaacaaaacttctttttttccttcttcctctttgttcgcgtcacaaattaaatcccctccattctcacctttcatcgatcctttctaaattttcgttacatcaacctccccgtgggtcattgttacggatccggtgtcattccaaaccctcctgctactgttactagcatctagcattccacaacccggaatccacagatctcttactactatttcttaagaacctcgattgcatccgctctcgatccacaatggactatagtatggaagatacacagaactcggcgcccgaggcgcagcaagccagcaagctgaactcctctggtcaaaaaagcgacacccagagcgtgaccaaacggttcgcctccccctccaaacagtctacaaatcagcttgctctttgtggttacatatagctaaccccatctctttgatttgtatagcctgcaagccgagctcatgcaactcatgctctccccctcgcccggcatctccgccttcccggacgcagacggcaacctcctctcgtggacagcaactatcaccggcccgaccgaaactccctacgagggcctcacactgaaactctcctttgcattccccaacaactacccctactctcccccaacagtcctattcaagaccccgatctaccaccctaacgtcgacttctccggccgtatctgcctcgacatcctcaaggacaagtggagcgcggtctataacgtatcgagtgttttgctcagcttgcagagtttgcttggtgagcctaacaagtaagcacctgcccacaccctttataacttctatcatcgctgacattgacccagtgcgagccccttgaacgcacaagcagccgagctttgggactccgatcaggcggaatttaagcgccacgtcctcgcccggcaccaggacctggacgacgaatagaccgttggattttatattttttttctcattctgcatcggcgtcggttggcccgtcgcccacttcattggcggtgggatcgtgctgcaaacgcataacggggctggtttgcgccttggagttgttggtttacttggctatgccctaatttatcttctatcgttattactagtacctctgaacctccgcattcaggtacaagcgtgaggaattcttgctcttgagatcctcgggcggttccctctcgttttatttcttttggtcattcctcctaggatggtagatctactaattgtcgtgctgttgtagatcatttgatcttgtacacgcattcaagattctacactatccgcttaagtatataagcttcgcttgtccacacttcagtatatagttaggggggtgtactttatatcaaggacagagtcccactactaattctcgtacaaccgtgcccaagtaattcccccttaaaagcgaagaaacaaagataaacagaattaggaccgattcagtccaataaatttgaagtcgacgctatcagaattggccaaccccagaaataaaataaaataatacccaaacaaccaaataatcaccccccaaattaagatgtcgtggaggtaccgaagtactgcttctcattggtaatcaacaagccggcaatcgtggcactagtgaaagtgctaatggctccggtaaccatagcactaaatgcaacacgggacacatccttaccgcgaccaggtgcaatctgcgacaggacaccgatctggttaccgagggagccgatattcgcgaatccacacagtgcgtatgtaacgataaggcgagagcggtcggagagatccttgtagtctgcgttattttggagagcgtcgtaggcgacgaattcgttctgtggctgattagaagagggaattattgtttattaagaagggaaacttacggtaacgagcttggtaccaatcagttgggcaaccttgagtagatccccgtcccgggagacaccgaggaggaaggcaatcgggtagcagatgtatccgacgatcaactcgagggtcagtggggggtcgttgatgttcaggtatcggccccaccaagtgaggaggccgttgactagaccaatgagagcgatgatgcacaggagggttgatgcgatcatggcggcgatcttcagaccgagccaggtgccgctggtgaatgcgtggagggcgttggcagagcggtgttcgtcgtcatcggggaccacgacacggcctgcagtaagggtttcttcctcttcgggccaacgtagttttgagactgccagtgaagcggggatactcatcacacacgcgctgaccattgcctgtgggttgacaccgatgctgatataggcgatcaggacacttccggcgatggtggcgaagccagagcacatgatttggtgcagctcggccatggtaagatgggcgatgaagggacggatcagcatggcggattcaccctggccgatgaagggggatgcggcggcgacaacggcttcggcgccggaaacgcgcatgctccagaagaagaagacggcgaacttgccaatgaaccactgcaggatattgaagtagtacaagagctggacgaaggcgacgaagaagatgatggcggagatgacgctgacaatgaagaattgctgtggggcaaagcccttgtcaaagtagtagaaatcctcgctggttaggaatatgactccgtcggcggcgaaaccgagcagatcagtggctaggcttgagatgaagttgaagatgtcgtatcctgcagtggtgcggagcacgaacagagcaatgatgaattgcgccagcataccgacaatgacagtgtgccagacgatcttcttgcggtttcgagatgtgagccatagcccgaagatgaagaccaccataccgaacagactgactgcacggttggcacgggtgttatcctgtgattcttcggaaacgaacgagccaacaagaatcacagcgatgcatagcgcggcggcactgggtgttctgatcttctcgggaatgaggcgcacgaaagggtgagcggtacgcccccagacccagtgcatgggccttgacacgacagtaatggggacatagaagaagattattcgcagcgtgatggcaagatagagcaggaatgggatgagccatcctatatcatgtcggtgtaggatcaggccggcaatccaccaactatgtgaagagtatgtgtgagcctcgtgttgagtccaggatacagtagtaggatcgaagtcttcacctacccggtaaacagtagccagaccacggcatggaatatatgtctccattgttttcccacacgacgataccaagtgcgcttaactgggagagtctcgccggcttcctcatcgtcggagttcttcctgccgtggtccagaggtgtttgttcaggcacgattcctttttcaaactcgacatctttcgagtagaccacttcatcctgacgtccctgttcggcgaaggcggtatggtggtgatgagcatggtgatgctgatgctctggatccagcacaggatctacatggtgaacaacctgcgatcctgctggatcaacttcatgggttttctccatgacgatgcccctccaatcgcaacggaaggtatgaatgtaggcgccggtagcaaatttacaattaagagtgaaactcaaaaatacctcgagatttagaccgcctgtgattgttacccacaaggaaagttgatcttttataacaagtaagggcacagatttagggatctcccattggtattgtttgaccttaaaaacctgttggtttattatttaattattggcatacatattacattttctgggggatgagagataaagaacgcccaccaaggattagaacaagacactagcgtcgggccatctttccttctcatcctgtttggctggaagaatggccatgaacggattgaccgacggtgtacagcggagatcccgtctcgcctagagccagctagagccacctgcagccaaatgtaaccacattgacggcaaagatgataagggaaggtagcattatcttgccacggccacccctgtcgtcttcattgattggtgcaggtcaggctaacttgctggctaacttgtctcaaagtccaggaaactctctccgcaccgggtagttgtggatcaacatgggtcgtgtgcttaatttcccgtctttccgccgacctgagattgttgtagtttctccaggggcgcgtgatacccgagcgcttgagcaagggattggaggctgaacgtgaaaagaaacatatgtaaaacatactacacaacgtgtgtggcctgcattgtgcgttgtttcaaactccaccgatgtctgaatttgcttcataaatgtggcggtttagcgtttaaaaaaattggagaccagaaaggtcgataagagcagaggggtccgagatacacacgcgtggcctcctcagagataatcccccatgtacgaaagataggcgcttcagaagacacagcttggcgtccttggtcatggaaaaacgtgtgatctagaatagcttccaagacctctcaaggttttggtatattagaccattctgtgattgtcacctcgtggcttgggacgttggaagtcttcggggctggactgcggagcacgccgacagttacgtaatcacgtgagcccggggatccaccggactaaagttgaatgtcaaccatggaatgggaagggcacatccacgggtggccagctgccgcgaggcataaatctatcaacaaggtatgttgtacatgcgagacagcgtgttgggtaagaacatatctctggagactgtaaacagcctagtatagccgctgtggttgactctcaggcaatacagcactgtatgctttcaaggacgtaaggttttactgggaaacaaaagagaacaagagtacaaaattctcgacagcgactcgcagtccagaaggtagtcaagagcaggtatggcttatgatctagttaccaactaagtcactgggatccgctggctctactacactgactttgatacttaaccaatgaatgcttattaagttctcatactctttctagtttcatcaataatacaatcagcattctcgccttctaccatgcacctaggcatctacctatttggatagcggtggctgggaaacctgaatctatccaattacccgaacgattgcagaaaagagccactcatcatgcctacagagaaatgtgtcacccacgttgagtgactgttcaagcgatctatttgttatgtttactttgatatccggctatctaaaaagcgtcatataattcgagtcataacagactttgctacgaatactctccatccatcaagactggaaacgagatcatcttttccagtgtaccgagacagagcgagaaccctactagtcagggctaacgtcactccagccgtaacaggatccagctcgccacatgcacatgtgttctctgtgagtatttcgagatgattgcttgtaaagagaatagacaatagattgaaaggcatttaagtgtcagatgaaacaaaaatgaaaatgaaaagaaaaaggaaagtgatggtgaaccactgccgagaagcagtcaattggactagttaactaactaactagttagttacggagtagttatagaagcattcctgaggcatagatagcaacgcagacaccttcaaccaccttcccttaccttcccttcttagtagtcaccccatggtgttctctagcactctactactcccagtgacggccctgctctcatacttgtttcgcaggtagggctgtcagtgcccctgctgtccccgttgcagggtcccctcttcagtatgtgttttcttaccaacgggtcgcacacgtggttcgaattgttcaccccacccttcatcactcatcctcttttgcttctcctccttatgaccgttattccgctggttaacaacagaggttcacaggaggatccgaggccgaagcaatcttaagagactttcgtgacaagatctgaaatgtttgtatcttgagtgcaaatctcgtttcgtgtagagtggcgctgttttgtgaccgacgtggaggggaatcaaggcagatgtgatgctatatgcttcaaaatctgatgaagatggaactggtcagcggaactaggtccagtcaagctcaaacatacacactgatgggatgtgactgacgaggtgacgactctcttttgtatcgagtatcacggcgtacacttcgccgcaaatgtaaggccgaaaggcaatatttgctgcttaaagcaatcagactgcgagcaaggtacacgcaatctgaagagctgtactagaaaagacagggcgaagccgtctctcggtggatgtttgaaggaagaagaccgagaagaaaagtcctggaaatatctgaagtaggggagcaaacagatgttagtagggccctatggctactttcagagcatctagtacgcactgagtttatctctgaatatgttaatttgtttcgatagtgaacactttctatctttcgctttccaggagtccccgagaaccctacatgctaagacatcatatcattcaaattccaagacctgtatataactgtaaatggccattcatgatcagtacatctttatattattgtagacacactcgggcatacgatatccaatagacaaaggttcttaagtgcagtacttagtgaacttgttgatggtaccacctttaacacacacaccggtacagcaatcgccagggagaaggcacgggctgtgagctagtatcgcatgtagcgttagcctcgtattcctaacactctaagaaagtctaggagaggtatcatgatcatgatagaagcatacttgatctgcagcgcttttcaagagggttggtgtccaaagcagcttcggggtttgggacagcagcagcattggcaaacgcagcaagagcaacaacaaggacaactttgaagaacttcatagtgatcttatcggcggaagaagaaaaaatggtaagtgagatgttattagaggaaatgagcttctctttatacattttgatctgattatttcctggcccccagccagcaggccatacatgcaggatcggctatgttgtcctaatgaacttgttcgagttatctgatcttacgccaagccgtcactctccttcgctcggttgcggggccaccaatagcatcaagttactgaatccttcaatttatgcagcttcgctcgattggctctaaagaccgtacaacaaagctaagcatattactcggcagtaacgtctactcttggagcgtatttctagacggagagatttccgtaggcccccaggctatccgggcgacgattctgtatacgagagcttggtcaccttgcttttctcttcgccttcttgaagcctatatgcatagacgagtaatattttactttcttacggcgccaacttctatgcagggtattttggaaggttgaaatatccacgtctccatatcttcgtgagatgcttcttttgtatggcgaagtggaaaccgtaaactcggaaacatggctgatcattgcctagtctaaaagacccgcatagtaccatgtggagaggtgttaccttcctaatccgaggatagcgtactagaagagctattttagcaactgatcacattgtacgttcgaaaaatccactgccagtcgtgatgagaaatctcactatatgaacagaagcaatggagatgtacaaacaaacaaaatcataactgactggtgggtgtcttcttggggtctagatttacccattagaacaccacacctttgacctgagcaaccttgttcagattgatattcttgatcatgatagtccacgcaaatgccagagccatcacccccacgccagcagagagcatcctaacttgtgtatagccgtacgctttctgtattgccgttctcatcggagtaccaggagcatagctcagctgtgtctcgagatcttcataaatcatgtccaggtctttcaagtctggcagataccaagtaagagccttcttgtaagtgttgttccagattgccatagagatagtaagacctgcagaatctccgatggtaccgaccacgttgagcaaggcgagggctgtagcaacatgctggtgatcaacggcagcgagaatagatagctgctcgacaatgatgaagatcgatccgccaatggagatgaagatttgacacatgacctggtaaccaacactctgaccaggacgacggaagtagatcatcaaaccctgggcaaagatgtatagaggaacggaaatgtaaaggagccatttgaagcgaccagtttttcggatcgcccatccaacaaagaataaaagtataccagaaacgacgtcgaatgtattagtgatatacccagcttcggcaatagtgaggtcattaaccacttgaaggaaatttgagaagtagttgttccagcaatagtttgaaagctgatacgtggcatctaagaggcatgcaccgacgacggttcggttcgtgaggaaggagtatgggagcaaaggcgtaggagcgatatacctctcgtagaaagcaaagaagaagagcatcgagaatccgaccacaatcatggcaatgatataattcgtgccccagcctttaggagcctcgctggcaatgtcaaatggaagctcaaatagcacaagtcccgcagtgaagatgaagactccgattactatgatactattagttctctgtggatgaatcagttggtagttcggaatactcacaatcgaattcgagtgtccaaaaccagatgctttgaaggaatgatcgtccactgttctctctgataaccacagcatttccctttttggcttttgtcaggttgaacttcaggacgaagaacaacggcgcggccacgacagggaagatgatggcgaaagtaccataagcccatctccagccagtatgggcgtagaatagatccgccacctttggcccagcaaacgccgtaataatgtacggagaagacgtgaaagcgtatgcaagggctcggttcttcaactgggagagatcggcggtgatgacgtccacggcaaattgcatgcctccgaagccgatgtagtaaaacacctagatcccctattagcacatgttcaataattcatagatattcccgggctgtcttacatttgcagcgcaatagacagcgaaactgttgcaagaggccatcagaacaaggcctacggtggcgcaaattgacatcaccaggaacccttcggctcggccccaggtgtccatcatcttggccactggaaggaagacagcagccgaaaaagcatccgcaattgcggtaggaagaccagacaaggagtgttgttggaaagagctagccacataagtgctcaagctgccatcgattgacgatatccaggcataggtgaaatagaggaaccacatactattgaactataagattagcgatagggctgaaaagcgggtgaattgacttgcttactttatgaaaacgaagatcagggagactttcgaccaggtctgagccacagcctcaacttcctgaataccatgttgaagctcttcatagggcacacctggtagctcggcaccattgtttggaagtgtatcttcaggatggctgattgaaccctctgacttctccgcctctactgtgtttctgtctacttcgaccgaagaagaacttgcagcatcatcactgtcgactttcattcgacgaaagactgcccgagcccgttgtatcaagggacgaagcgtcatggcaatggatataagactcaaaattccaacgactcagagaggttgaaggtttcaggaagattttgaaaccaagagggaaaggcaagtaaaacaagcgaaattcccacatataaagtaaaacatcgaagtcggcacgtcggctagtagtattttgaacgaccgacaatcctttcctcctagatcaaaaatgttacaacatgcgtggtattaatataatgtagtccaaacatattcgttcaggccgtggacccttgctccactggggcctgcgacaagatctaatcagatcgtcagtggcttagagatctttaccacatccagttaccttgatcgagacccatcaggcccattcccttccaacgtcagtgtcaagcttcgtatagctgcttggaaatgtaccttggcattatgggccggccatattctctcaaccggaaaacacgggtcgataaaaatcttggaaagttatcagatttgccaagatttcgcattcatgggtaaacgcgtaaaattgatttctttcccctttcctacattagaatggacgtgtaactcaccaataggtcagccatttggctaacatatacgcaaacagccaagatctcgccggatgagaatctcagtacaagcctcatggcgtaacttaagccacccttggctcccctcatgcctccaccttgaacttttttttgagattaaggtgtttagcgttttttttttgtacgcaggagtctacataatccgattggccatatataattatgcgtgcatcccgaggccaattggaccgacactggatgttgtaccttacaacgcctgccggaaaagatatcttccggtatattatatttttcggtcaataacaacacgcgtgttttgtacacgttggcaagaattagtcactggaaagtcgcgatttcaacctggttcgatctcctttgatcagccttccggtggatcccgaaaatgactattacatattgctccgtctggatatgcattctcttttcgggtttcgacaagtaaaccacattcaaggccttgcctggagtatatcgatgcgtgagattgtatataaataccgccgccgcataacgatcgcctcagttcatcaggttcttgctattttggcttgcaggcagcaaccacatacactcgcgcaggcccagcttgtcagctccggacgaaatcccagggttgaaaaattcaccttcgtgggatcgtgtgcactcccgctgtaaacgtcaaaatcgaccgaaattcaaccatttccgatggtgtagactagcacagcggatgtaggaatatagtaacggacgtggaatcaagccaatatggctgttagattcgacgagatgggctatctttagtatgagaccatgacaatgacgtgaaatctggctgctaatgtattgcagccaacctccgaattcctaactatctcaatgtagtgtatcaaggccatcctaacttcaccctagtagaaatacaaacgtatcggggattggatgttcttgtaagctgtccatacgataaatgaggcgaagctcctagttcacgatcaaagaaaaaccaagagataagtctacaacatatgtacataccaccactttaattcactctatcttacatgattatttggtcagtggtcgttattgagctgttcattttgtcgcgagtaggaccggcttctcgatatacctatccacactaaaggatcaaggtatcttttcctgtacaccaactaataacatggaaggctatcgcacttcacctcattcgcagtttcgattcaaatatgtttccagtttgcgccaatcaaaagtagacgatacactccaaggctaccagacgaaaacggatatggcggggagcgtaactttcccctctcgacaatctggtcccactctgagtgtcgactctacaacctttttgaatcacttcaaatcatggcaaatacagagaatgaatgggaattggaggagggtatccctcagtttgaggatcccttcatccaacagtatctgaaaggacgcgatgctttaattatggaagagaaaaagcgacgtcatggtatttcccactcaagtcaagtaaaaaaacttcatatctgacttttgttgtagatgcaaatctgcgcaaatctttatcacctatcgccgcccgggcgacgaagattgtgtcacatatccgagctcaggaacagaacgagctgtggtcaagtggattgaatgagaacgcggcccaccaggcagatgaaatcctgtaccccggtgtcatgttcaatctggccaaaggccgcatggagacgactaaactatggaaaatcgtggaaaagatgcccaagggttctctcctacatgcccacatggaagccatgttcgacatggatttcttagttgacctggcattctccacgcccggcatacacatgttagcgccgaagccgttgatcacagccaaagattacgaaatagcgcccgtgtttttcaagtattcctcgcagcctctagaaagatccgaagacaagccaagtatttggtcggaggcatacgaggcctcgtcattgatctcgatccagaaggccgcctcctctttccctaacgggggagagaagggtttccgggaatggttgaatactcgatgtgtgcttatgccagagcattcgtatcaccaccatcacggagtagacgcaatttgggctatcttcaccaagactttcccaattgtcggctctctcgtgatgtacgagcctatcttccgcgcctgtctcttccggttgctcggacagcttgccaaggatggagttcgatacgtggagttccgccttgcatttgtcttcgaattccgaacggaaggaaatgaaaaccccgaagaagactacttccagtggtgtcgtgtggtggaagatgtcgtggctcagttcaaacaaacggacgaagggaaggacttctacgatcctcgcattatttggactacgctccggtggtttgacaacgagacgattgtcaatagcatgaagcagtgcatcgaaacgaagcaggagttccccgctctgatcagcgggtttgatcttgttggtcaagaggataacgggaggccgctagtcgaccttgttcccgtgctcttttggttccggaagcaatgtgcggaagaaggcgttgatattcccttctttttccacgctggagaatgtctcggcgacggcgacacgacagaccacaacctattcgatgccatccttcttggcactcgccgaatcggccatgggttctcactttacaagcatcctctactcattgatttagtcaaagagaagaagatcctcgtagaatgctgcccgatttctaacgaagtgctccgccttgctagctccatcaaatcccatcccttgcccgcgttattgtccagaggcgtccccgtttcgctgtgcaacgacgaccccgcaattcttggccacggaaggaatggattgacacatgatttctggcaggttttgcagggacttgaaaatgtggatttagtcggcctatcaatgatggcccagaactccatccggtggagctgctacgaagaccagtcgaccgccgagtggaaagctggtattcaaaatggggtaatggggaagggactgaaatctgaacgtctgcgggatttcgcttcgagtttcgagaaattctgcgagtgggttgtgctggagtttgctgagtacgatgttgatgttggggatgattgaagttctgtgtccaaaatatacgagtcatatacttagtaacctagcacgaacaataaccaactaactatgagaacacgaaagttgattttggtaatatttcaactggtgtaagtgaaattttatcaccatcgaagtaatttgaaacagacaactcaatgagaagataattggtcaaatctggtgtcaatcggtgagttggcacgtcggcgcctgactccggtacttatcgcgcctttatcaggtgcccggaacgtcattgacgaacattccctccgtcacgacctcccatccactccgctttgtcggagctggctgatttattgtgtttgttaagctattttcgatgatccgagtcggcacatgaacgagccctgtcccggctcccagtcacgatggcgtcgtactttatgccatcgttcttccagaagcggctcctcaaatatgccctctctcgcctgggcctggtcgacacagaggccttggatccagataacttaggtatccgctggggacaacggtctatcatcgagttgagggatatcggtctcaaactagaggtgagtgagtgggtgcagtgagcctccgcgggcggcggggcggcctgtcgtgatcatcgaacccgacctacagagcagtgcgggctaactattcacatcgcggaatagaaactatcgacgatactcaatcttcctccgtcgtgtgagctgctcagcgcccgtgttcagcttcttcgaatcaccctccctgccgatttccacaacagcgggatcctgtgcgaggcaaacggcatcgacgtacatattcggttattgtcagaggagccgaaaaaggaacaaaacacaaaaaataaaggcggaaaagatgactattcggcggtgcccacaccatctggtcttgcggagtcattccttgagtccgagccaaaggaggagagggaagagctgcaagccgcaatagcgtcacagtcacaggtcctgccccatgacccactagcctggtctgtcgatgacgatgacgaacttggcctcgggagtgatactctatcactgccgagctttgtggccgggttcttgaaaggcgttgtggatcgactccaactcaagataaaggatgcagttgtgcgagtagatatggagttgaagcaagatggaacgtcaaaacggcagcctgaacacaagccggaccttgtcgcgggtctgctgagcgtcggggaaatcgatgtccacggagtatctgagaaaactgttggtccggacgaggctcttccattccgacaaggaaagcggttgatatcaatcgccgatatcaacgttggtttaatttccgacccatcggtgttctcgaactactctaggtttgctgcccccgcatccccatcgacaactatgcgatcaaaagggagcgagccgtcaagcagagcgtcatcaccctctccgttgtatcgctctgttgaagaaccccttgctatgacccaatcaactattttcgagccgccgcaagcttttggtcattcaagtactacctcggacgatttggaggcatctgcattttcgcacggtcgattctcagacgccgactccgagtcaggtagtcaccacggtggatacctggaggattctcatgtatttggagatgaccccttccaagacaatcctgggtacctagactcggttatagacactcaattcgatgatttcgatgatgagcagtcaccagtaatacatcctgaggaagaccaacggttcaggaatcaatggggaagccacatgtctcatggcccacaaagcttgcaccacagccaacgggcggaatactctgatgagcccttgcttccgtctgacagccatcacatgtcccggacttacgaaacacataacggccaaattggctctgaaattgacgaaaccacgccactcacgcagcattacaacgattacaacgaaaatgaacataatgaaagatcacaattgagcgtatcatcccattcttctagtacatctccacgcccagagcccgagagcacgggcccacgagaagaaaccccaaatgtcgatctcaacgagtccaggcttttctctcatgatgaagcgcaaagcctttacatgagtgctatcagtcaggatgtgggtgacagcttcatgcctcacataccaggtggatggggctcgtttaatcgtggatcaaaatcccgaagtgctttggatgaccgatctaaaataaccgcgcccattgacccggcacagtccatccaagttcaagatgaagcaaattcaaggtgcgcatctccatcaggagacaatgtcaccgagggacatgatctggacgaccaaggccaatctcagacattgcacaaggacagaccctcaacttcatcgtctcctgggttgcacagaatcaatgaaatgaggaagtcgatattgactgtggataagattttgatgtggttttcgcctcctgcttccgaagaagaggcgccagccctgtcctcgcctgtgccgcggaaagagaacgcagagagtgacctaactgaatccacagttagctttggtgactctgcaccagaggaaagtctacttgcctctagactttacaaatctacgagattcggaagagactttgttgaggcacgggcccagtcaagtgctggacctgaactgcctgaaattgcggtggaagtgttctctatctccgtacattttgatattgcaactggttggctcctaaccaagataggacaaaaattgtctcacgctgttgatacggccgaaaaagatatgtctgcgaagcagtcacgaaaagaccagccggcgcgcacaccacctgttcatcttgccgtccatgcattttcaataaaattcattgaacatgttccagggcatgtgtattcgtccgacgataatggctcgtcttcgtctcctccctacaacatggacgatgtgatccttcgtctttccttatctggtctagatgctcgtctttcagctcaaagtgtaactaccaagctgaagcttcacgtgtccaagtttgcattcgggttcgcctccgaggatatcatattctttgatgaaagattgaagatgcgtgaatctacgcgtgatgttttatcaccttcgcagggagatatttctatctctttggtcaagtcgtcagacctgaccaaggttgacatctccacgctacctctccacatcaatctcaatgtacagcggctggaagaggtcctaggctggatgggtgggctgagtaccattcttgaacttggaagttctatgtcgtccgtgtcaacggttaaaggctgcccgccacctaccaaggcgcgcccacgtggtgtgcattttgagacatctgttccagctattgacaccaccaagggcaagtcagccccattgaaaatcaatgcccgagttggtgccatcctgttggatgttactggtgaaacccattgtcttcaacttaccacgaccgccgtcaaaatcgtcagcagatttgaagggattggtattcaaatagacaaggccaaggtgattggtccactttcaattgatgatgcttcatctgatactcccgccaaaatcacccttaataacatccgccttgaattcctttttgccccgaaggaggtcgatctcgatcgtcttttgacattgatcactccgtcccaggacaaatttgaggtggaagatgatatcatgctagacacgctgttgcgccagcgacgacaaggatcagttcttcgtgtgacagtcggacgcttagaaacgttcatttcagataccagcggtttagagcctctctcgtctcttgctgtcgagctgagtcggctttccaatgtcaccaagtatttgccggaagatgatcgccccggcattctcactttgatgctggtgcgtgacttccaaggacatgtccacgttggcggagaagtcggagacctcaagagtcaactcaccgatgttgaagtcgcacacatcaccatgccttcgctcactgcggtccaaattggaaccatgaccgtcagtcggaataacgatgaagagctggtgggacaagccctgtggccgccgaacaggtgtgaggacccagaccagtcctatccgccggtcctcatggctcgtttcatacccgatgaaatggatcctacctacaagatcaaactgcacaatctccttgtcgagtacacggttccatcagtgacggccttccttggattgggtggcaacaagatgagcggggatctcgccagtagtatggtcaactctattgccaaccttgcagagcactcgataccgtcatcctcgatgacaggacgacctatgtcgactgaatccagctcctcgacaaaacctgtcaaattggcagtcgtattcagagattgtgttattggcctcaacccccgcaattcccatgcaaaaggcctcgcagttctcaccaatgccaagttcggaggaagccttcatggagacgaatcagcagaagcatcgttggatattagaaaagcctcgctcatgatcatcgacaacgtgtaccatgaggaggcctataacctgcaccaacgaggatcggtcgtttcccaagacacccaggctcaagcgtatatcgataaaggttatgttcctgtttcttccatctcatcggcaactgctagtgtcaagcttaccagcgcggaggatgggacaaagtctttggacgtagagttgagagatgatctgttgattctcgagacctgcgcggattccacacagacgctcatcagcatcatgaatgggctacagcctccaactccaccgaacgtcaatatgaaatatcgaacagaggttatgcccatccaagatatgtttgcttcgttcaccggggacgcatttgctgctaatccccccatttccaacgataatgatctggcaactatccccgaagggtcatccggagaagatcagttgaccgacgaacttgaatacgttagcgatttctatcccgtgaaaggtggccctggtggtgtgggcgttgagggcatggaagcgggctccaatgatctgctggacagcttccattcccaataccaagtatcgtccagcatgacggaattggatttccaggaggaccattttgcaaagaaatcagctgtgggtggaacggcacatcgatgggattctacccagaacacctatggcttcaccaacgacacaaagctcgagcggagtcctttgcgtgtgcgggtgcgagacgtgcatttcatctggaatctctttgatgggtatgactggcagcgcacgcgtgacacaatatccaaagccgtcaaggacgtggaaatcaaggccacagaacgccgttccaggggctcgcaagtgtcacctttggccgaagatgaagaggagtctgtcattggcgatttcctcttcaactccatttatatcggtatcccagccaacaaagatccacgggaactccaccgcgagatcaatcatgacatcgatgatttcactagtgagaccgggagctatgcaacaaccgctaccctgactggggctggaagtcgccagggccggtcaggctctaagagggagaagaaattgcgcttgcatcggagcaaacaccataaaatgacgtttgagttgaagggggtctctgccgatctgattattttcccaccgggctcggaagagacccagagctcgttagatgtgcgggtcaaggatctggaaatttatgatcatgttccgacatccacatggaagaagttcgcgacctacatgcgtgaggctggagagaaggagagcggaacgagcatggttcaccttgaaattctgactgtaaagcctgtgcctgagctcgctgcatcagagattgttctcaaggttcgttacccagtaaaccataattcagaccagtactaacttgactcttaggtcactgtcctaccccttcggttgcatgttgatcaagatgctctcgactttatgagtcggttcttcgagtttagagatgaggccgccgaaccatctgatactccgggcgatgttccattcttgcagcgagtagagataaacgccgtgcaagtcaaattagacttcaagcctaagcgggtggactacgcaggactccggtccgggcgtacaactgagttcatgaacttcttcgtgctggatggcgcggacatggtactacgacacgtgatcatctacggagtgtccggattcgaccgaatgggccaaactctcaacgacatctggatgccagatgtcaagcagaaccaactacccggcgtgctcgcgggtctcgcgccgatccgctccctagtcaacgtcggcggcggcgtgcgcgacctagttgtcatcccaatgcgcgaatatagaaaggacgggcgaatcgtgcgcagcatccaaaagggcgcactagcctttgccaaaacaacctccaacgagctggtcaaactcggcgcaaaactagcgattggcacacaaaccgtcctccaaggcgccgaggacctgctgactcccaacgcaccaaccttcgacgacgactccgcggacgaagacgaagccaagaagatctcactatacgctgaccagccggttggagtggtacagggactgcgtggggcgttcagtggcctcgagcgcgatctacttttagcacgcgacgcgatcgtcgctgtaccaggggaggtggtcgagagtgggagtgccaaggcggccgcgaaggcagtctggaagcgtgcgcccacggtcatcctccgacccgctatcggggtttccaaggctgtgggacagactctgcttggtgcggggaataccctggacccgagcaatcggcgcaagatggaagatgtaagtgatctccgcggagccctgttttggttcgtggctgtggctgactacgattttagaagtataaacggtactgagactgagagtgaggtgcacgaggggtggtttggcccttgcatacttcgtacatacatgcatatttgttggttccttttctggtttttgatttgattttgatttttccgagttcaggttactttcctctttgcttcagttcgataccacatcacgaccgcattacaatcttaaattgctcttgcttgttctttcacatacttccagggattttcagtttcagtctatatgacgtgggagtcccgagttcaataaatgatcgaggtcttaagccagatctattgctacggatccaccaagtaccagaaccagaagaagatagcgaaaagcgatgtcgatcgcagttcgtacaacgcggtagcgtccgagtatactccttgaggcagttgccaccatgaagactccgtaccacattaaatcactggaaaattgtgtaagtcccgacgatcacctaggcagcctgtcacctgggcagcctggggcaacgagccagcaatctgtttaaaattgcattctgcatgctgcatgtgaaacaaatctgggggttgcagtaacattggcagatgacttgggcacaattaaagatgagctggcatgccgatctatgtacttacagccaacgtgtgcatctgcatgtgtgccttgattctctcaggtacgagggtacctcgtacgaggtgcccaaccatggaacaaagatcaagagtccaagtccagtccaggccaacagaggacataatgtatgtgtacgtactattccacttcctcccagccgaaagacgacacgaatcagccattgcgagagtccagatagacgagataaaacccgtggttccttgcggactgcatcaacggtgcatcactgcaaagtaccccatacatacccaaggtacggataagccctgggaaggaagtccgaccatgaccaagtcatgatgttgccggtggagaagggggaaaaaatattttcttttgccacatttgaagtcgaaccggatgtccaatcatgggggctggaccccacagccgaaaggaagatttttgcctggctcggtcgtgtgctaagacacaggttcgttctgttcgccgactggttctgggctttaagaggcggttggtgaagattagggattggggtggatgattggttggaaatagatggacgaaactaactaacggactagactaaaggggagatcgaggctgagatcatctgcaggtgatttgggcgcgacagaatattcccttactagtatcattcaggcatcctagcatataacatagcgtataacatggttctatcaacatatatcaacataacatccctatacaaagatgacgtcgaccagttgatcgacgaaccatgggtcactgacagtccggtctcgaccttttcctttgcttttctcttcttcttcgttggatcggtagggccggcttcccctggcttttaactagttcgactgggtcgatgggtcgagttcgactggctatagtatactcattgttcgtgattgagtggatatactctgagatccaggcacattccgttcgtcccggtttatattttctttttcttttcaacataaaattgctctccctgcccttctgtaccttgcagtcttgtttattgtgatccattgacatcttgcgaccggtaagcctatctcctatcccttgcggcctgaatctgacgaatcaagttcagtgtggagaagtgggtttggatctactgcattggatatgtcgacaatctaaagagaggtttgagaaaacatccagaagcaggccttcaagcagacacgcgaaatcggggatattcgcaattccaacatgaatgaaatcctcaaccactccgccgccaacgacatatggcatggcgagctgctggacagccccctctgccacaaatgtctcgatctccatgataaccatgcatgtactactcctctttccaaaccttttttggacgcgggagacgctttgtccctcccccctcgatccatcaaatctcgtatcacgggagacctttccatccacgactaccacaagttcctctccaaggctgcagaccgcattggcgatcccgtcgatcagacaggaaagaaattgaagcgaaaaactgctgcgttgcatttgaatcgcccgtcccctctttccatctcttatcctgtatctatatcgtccgtggcctcgagtcctccgccgctgtctccttcctgctcgcaaagcattgtctctcattggagtgaagagcctgagatcggggaagcccagactggtaagcatctatgactatccggtcgattctctcgagcatttattaacacttcatagttcagtaccgatctacacaaagccctggactccccgttgtctcagatctcgggaatcgtgctagacctaacaggaaacgattggtaagttggctgagacactacacaaagacccagctcacttattatagtccaagaatacctttagggaaaagctccagcaaaaggcccaagttcaagcggaagaagaaacagaaacagaacctgagtctgcctccacacctcaaccctcggactcaatgctggccagtacgcaggccgttgccaccgtctcacacggtggtgcctgctttgagatcctgaatccgcgcaagtcgctggatctagcacgcatcgtctcatacattgaagacgtcgataattgctccgtctccacagacaatacccgagactcgactttttccatcgagcaaggactggaccgggtgtccctgtcccaattcaccgatgcctcattgccatcattctattccagcaattcgttgtacacctctatctcacccgatccctcgacagccaaaggtcagccggcggatatcacctccccgcgagtcggcgaacgcgtccggtctctatcagactattctgtcaacgaacaaagcttcaactactggagccgacctgcacagagcactgacaacgagctacccttcgaaactcatgactacccaagcagcggcagagagggcccacaatcaccacccatggctcccattacggaagaaaccagccttccaaatctagatttttcccgtcgaccttccaccccatccacgcagaccttctattcagaaagtgagatcggcgagccgggctcacccgtctacgcaaacggagattgggctcaagtcgacgagcgcgacagaggcatcttattcgacgtacgggaagacgaaacaacacccgaccactaccacgactattcatcctcacaagaacatcaagacctgccaacaccccgcgaaccgcatctcgagacaccaagtggttcacccatgcactcgcccatgtactcctccttcgactccgcctacccctatccaacctcaatctccactaaacccccttactctagctccttcgatcccttcacctacgacccggtgtacctcgacccacacgtccagtctgttctcgcagccgcgaacgcagagacgatggggttacggggtaatcctgcacgcgcactggatgagctgcagcgaggggcgcccccccggcgccnnnnnnnnnnnnnnnnnnnnnnnnnnnnnnnnnnnnnnnnnnnnnnnnnnnnnnnnnnnnnnnnnnnnnnnnnnnnnnnnnnnnnnnnnnnnnnnnnnnnnnnnnnnnnnnnnnnnnnnnnnnnnnnnnnnnnnnnnnnnnnnnnnnnnnnnnnnnnnnnnnnnnnnnnnnnnnnnnnnnnnnnnnnnnnnnnnnnnnnnnnnnnnnnnnnnnnnnnnnnnnnnntgccacccgccggcgattcgagttccaccggagaaagagtgatgagcggaagactcagaagaaaaggctgaggaagttctttggttggaaatctgggcattagggagttctgtgaacttgccttgtgtccgttacagctggattctgtgaatcgacagctggctgtgtggtgacttttggaccgggaattcgattatgatttacgtccattatgatggaagagcgaggcgcttcggtgttggattggattggattgggtggactggctggatacgggtctcgattcttttcttttgttcttttctaccgtgtccttcttactactcttattacactttctttctgggtctgagactcacattgtatctatatcattttacttacattgacgcatgtcaacattccggttatctcaaacttttgaactcaatcattatcctggaatagcagtaacctttgtaaatgtccacaggaacgggtctactaacgcagatcaatctccaactccggaatatttctttctttatttcgggtatcaaatcgaggtatatacaacgccatccatggaaaccaaaatgcaacatcaccaaccttaacctaatctaaacccaacccaccccaacccaacccaacccaatccaacctaatcatcatccctctccaccatcgacgccaacgccgcactaacaagactcttcctccgaagaccctgctcattcctcttcccaaacccataatggctcttctcaatgcgactcgccaaaaccccagcggaagaactcttcctcctacccctcccctccgccacaccctccggcccaaaccgactccgcgacagcgcaaccgctcttctccgcggcgacgcccgcggcggcaacgagctgggatgacaatcctccccgtcgcagaggtccgccgacgcagaagggtcctccatcagcgagcgctgcatggcctcgacctctgactcgttgcactgcagcctagagatctgctggcgctgcatgcggacgtcatggtggtagggatgtggctgggggtagaaggggcgttcggagccgaaagctggtaggtcggacatcaggtgcggggggaaagtcgggcttgttgttgaggaggcagagggcgaggagagacagtcgacaccggagtcgtcggagtggtctgtgtctggtggtgtgaggacgtagcctgcgcccggggagcgccgggagccttgtgtgtgtctgctggctcggttttggtcgcctagggtgtgttcgtgcagtttctgcgttagggttgcaatcgataggcgcttgtggttgtggtctgagtcataggggaaggggacggaggttgggggttgttggttttggctttggttgcgggtgaagcgcgagcgcgagatgttgcggaagcgttgggattgtggtgagggacagcgtgaggagagtggggagattaggttgctgtcgctgtcgaccattagccggtcgtcggtgtcgagggcgaggcggtcgggtcgcgacgacggcgaggtgaaggagaagttttcgaacattttctttcggtgcttcggaggcgagggcgacgtggcttgagggtgtgttttgaatattaaggttcttgatctgcgttttctttgacggtaatgttgtcggggttgtcggcctttgagagttgcgatgtgggtttcgagccggaaattgaccacctacacttggaggtagtggacacggtttcgcacagtgtctgatcttcgattgatatagcgtagacgattatttgcccctcgggggaaaaaaattggttgtcgaccactggttgaggttgaggcaaatgtccacgtgatcggcaaccactgtgcggcagcgttagcacagacaggggtattttttctatttttgttgatttggatttttgtatcaaatcaaagcatttaagcagtagttcggtttcaaattcaatgcaatgaatttcttcgtcttttttctttttcttgtgcattcccctgcaagacttgcaagaccctggttcttaaatgcatgtcgatcctcatgtggatacccgtgccctaagtcgatctgcatctgcggactgcacgatggatgtacggcgtatggtgtagtaagtagtgtggtgatcttgatcagatatatattcaatcttgcattgtttgcatctgctggacttgcctactcatataactgggatttcctggcaaaatcatcgaactatgtactagacacgagatatatttgtgcttcactgaagtaaatattattagaattttactctggcgactcaacgcatgtacaacagataaatcccatataatattacgccccaagtcagtctagttgaagttgtgcatccaatagatataggcattgtaaggggtagcgaccataatccaagtaatcaagttgaagacatatagcaaggaacaaacatatgaactcaccgtaataggattaattctggattacgtcaataaagcgaattttctgtgtaggtgcgaagaacaaagtgattagagtgtcatatcattcaagctcgctgtttgtaatagaactggatagaatcccaagtgggttagacgataggggctatgggtgtggctaaacaatgctggagtcatgtaggtagaactaaatatgtggttgctgtataaagctaaagctcagctgggtggacacaactgggaggtcgaggacgtgatggggcctaggacggactggacgttggttaaatatcaaagtcagtgtagcagaagtaaggacacccagtggcctagttggtaagtctatcgagcagtaccgctctagactaccctctaggtcaactgcctggtttagaacactgtcgagaatttcgcactcacggctctgggttcaaaccacttgtccactttttttatcctttttcttctctctccctatattagaccctctaggtcaactgccaggtttagaacactgtcgagaattacgcactcacggctctgggttcaaaccgttcgtccacttttttgatccttttttttctctctccctacttttgttatatgataacagttctatgcttttcctacgcctttaaaaagggtagatgatatttgacatgacattctgtattctgtcaaggcattcactgtatgtcaacaacatagacttcagtatcaaaatgtgcgtcactcatcctattgactttgaccttggcgttctcggtcacagaaagacgtgtggtctagaatgaatctttagtctaatgcatatagtagttgactctaacatatcgctataattttacatggaaccatatatgataaggaaaaggaagttagaaggaagtgagggaagtgagagaagtgtggtgaggcatatacaaggctacgtgccgcctcgcttccttctcatctccatctcttcacttgcatactcgcttcacagtatggcagctgaacttcctgcaaaccaattacgtcttatttcgccaaaaccaagccctgcagatttctcacctcgcaaatgaaagacgactctgtctcccaaatccatcctttccaaggactctgtgctgttcttgccccgaagttctcaattacagcccttgtctgctctacctggatttgattcaaaatcattgggaagtgataacgatactttcagaattgaaaagctaatgtcagcagatctgaaatctcctccgtctctccaaccaatgtttcctggcgccatcccacattatactatatccatcctgatcatgtaacagagcctactttacctgacagacaacccaaatgatgcgggcccagtcatccgctttcgctatcgcagtcgcgcccggatcgagatctcgcaagaccttgaatcctaatcaccgaggttcaggtgtgactatgatgaagatgttatggataacattctcaacggctgcaaaatgattcttcattgcgaccggatgactctcaacataatacgttaaggccaggagtgaaggctagctccggtgcaaaaataaaaggaggtccaaagccttcctccttgggcgtccttattcggaatcttttgggctctgggttcataaccgctgctgcccaagggttccattcgaataagaccgattcccacattcataccggtggcagagtaatcggcaagcttatcatggaacccacacataggttgtgttgttaagattgacgatgcgtggaatttgtgaacgaaaacacctcacgctagctactccattgactccactccaactccactccgactatttgtttatagcccaatatagaactttatacggagtataccctattgtattccagtaatgcttctaagattcatataatgtgagggtgtatggttggataatgtatcaaagagacacgcctatcgaacgagacaaaattggtccagaacatttccaaccatatgcccttcaattaaaaaacttatggattcataactcatgtttccatagagtgtagtataaaatagtgggctgttctgtattcgcagacaaataagttggttggttaagtatcaaagtcagtatagtacgagcaaggacacccagtggcctagtcagtaagtctattgagcagcgcctgctctagactaccctctaggtcaactgccaggtttagaaatcattttccttctctctccctatattagttcctaaagtataaaggagtatagaaaaccaataagcatccgttggtaacttgatcgaccatgagccatactgctctaggctatactctaggtcaaccacctgcgttcgaaccccctgcgagtcgcagtcgagaatttcgcacccacggcactgggtttgtacactctctttttccccttttccccttctctttagtctatatttccttttgttcctcatatcaccttttgaagtataacagcatggtatggcctgcatattagatacctgagccgtatgccatcgtcctgtatgacttggtggatatcctcctttctatttgatatttatacttctatctgtttctcaattagatgccacaaatcttcaatcaaaatttcttgggtaaagcacgcatgtctataaatattcatggccttccgggctgtagataagatattctatgggagctgttgataataaacgcctgatggctctgccgctactcaaaccaaggttttgtcccgaaggacgagaccgaaagggggaagtcaggttcaaacaaacctcaatatccccttcacgcactcactcgtcttcatcatctggcaaaatattcacccaatattttctggggaagaggagaggtgcttgtggctggggaactgggtcttgcccactagccgcattgacggcttcggctgcagcttctatttgctgttgtttgggttcgatatgtctcggtgcatacccttggtcttcttatggcctagtcgccggcatgactgtttggcccttcgggggagggtaggatcagatgagggaggcgaaggagggtatcgtgcacctgaatattgtcagtctaaacatccaacatgattgcgacgagagatggagtattgacagcctgaacacgcgctttgcagagatggtgatgccaatgaagctggtccttatacccctgcatccttcgtcggttatgatatgcctacaacttcttcttcgctggtgttcttgggctccattcccgccgtttttgacttcgtcactcataacagtatcttcagtaactgtgtcagtctttttgcgattttgcatactgcttgcagccatctctgaggttatatttggtgaaataatgaaaatggggatgaaagtgggagggaagtcagaagggattgagaaaaaatgataattttttctacgtgagatgtgcaaacagcctgtgtctgtgttgctgaatttgctagcgtctacgtctgttgtccagtcatcctcacactagaaaagcaacaacgcgcctaccacgatcgaggagactaatatatagaaagattgtctgcattttataaattttgccacctcctcgttcatctctgacttactagaaaattagcttgctgttcaagcatatagcatgttttctatcctggtgtcaaaatgaataaagcatcatatcatccaagctcgctgtttggtcagaataaacactactttatgctctaagtatagacaaggggatgtgaaccagcagaggtaaaaaggataaaaaaagtggacaagtggtttgaacccagagccgtgagtgcgaaattctcgacagtgttctaaaccaggcagttgacctagagggtagtctagagcaggcgctgctcaatagacttactgactaggccactgggtgtccttgctcgtactatactgactttgatacttaaccaaccaacttatttgtctgcgaatacagaacagcccactattttatactacactctatggaaacatgagttatgaatccataagttttttaattgaagggcatatggttggaaatgttctggaccaattttgtctcgttcgataggcgtgtctctttgatacattatccaaccatacaccctcacattatatgaatcttagaagcattactggaatacaatagggtatactccgtataaagttctatattgggctataaacaaatagtcggagtggagttggagtggagtcaatggagtagctagcgtgaggtgttttcgttcacaaattccacgcatcgtcaatcttaacaacacaacctatgtgtgggttccatgataagcttgccgattactctgccaccggtatgaatgtgggaatcggtcttattcgaatggaacccttgggcagcagcggttatgaacccagagcccaaaagattccgaataaggacgcccaaggaggaaggctttggacctccttttatttttgcaccggagctagccttcactcctggccttaacgtattatgttgagagtcatccggtcgcaatgaagaatcattttgcagccgttgagaatgttatccataacatcttcatcatagtcacacctgaacctcggtgattaggattcaaggtcttgcgagatctcgatccgggcgcgactgcgatagcgaaagcggatgactgggcccgcatcatttgggttgtctgtcaggtaaagtaggctctgttacatgatcaggatggatatagtataatgtgggatggcgccaggaaacattggttggagagacggaggagatttcagatctgctgacattagcttttcaattctgaaagtatcgttatcacttcccaatgattttgaatcaaatccaggtagagcagacaagggctgtaattgagaacttcggggcaagaacagcacagagtccttggaaaggatggatttgggagacagagtcgtctttcatttgcgaggtgagaaatctgcagggcttggttttggcgaaataagacgtaattggtttgcaggaagttcagctgccatactgtgaagcgagtatgcaagtgaagagatggagatgagaaggaagcgaggcggcacgtagccttgtatatgcctcaccacacttctctcacttccctcacttccttctaacttccttttccttatcatatatggttccatgtaaaattatagcgatatgttagagtcaactactatatgcattagactaaagattcattctagaccacacgtctttctgtgaccgagaacgccaaggtcaaagtcaataggatgagtgacgcacattttgatactgaagtctatgttgttgacatacagtgaatgccttgacagaatacagaatgtcatgtcaaatatcatctaccctttttaaaggcgtaggaaaagcatagaactgttatcatataacaaaagtagggagagagaaaaaaaaggatcaaaaaagtggacgaacggtttgaacccagagccgtgagtgcgtaattctcgacagtgttctaaacctggcagttgacctagagggtagtctagagcagtactgctcgatagacttaccgactaggccactgggtgtccttactcctataatactgactttgatacttaaccaacaccgctcccttctgaagttctacttttggcaacttatttctctgttgtctccatgacgaattactgcctggcctgcttaaatctcctatctatcgtttatttcctcctatacaattctctgttgttgtttcatcgccgccaccctctttgacctcggggaatatcatatcttccaccagcagctctggctaacagaggaaacgggctcgtttcgattatattcggtggctcatacctctatatggtctccaatacgctcgagcgaggtttgatttccaatttaacataccgatctcttgctagtgttcagttatcggtactagttttacaatgcaggcgcttcataaccgccttgtgatcgacaatcggatccacgaacagcttttggagtctacatccttggccatttttgtcttcaaacgttaaggttttgatgatttgctcctcagcaacacagttattttccccagaagccaaaaggcaataatgcttttccgaacatatccagtttacacgccaatccgacgaacaatgcatcatatgtcagtgagggtggaagacaaagaatgcatgccaacctgaatacaagtgttattgtcgtaattctctatgaatcgcctattacaaccgttgtttctgaggaccttctgcccgagcataagatgctacccaaacatacgatcatcccaagaaatgataggcggcgactttaaggtgcttctgatggtagagttactccttattcagaattgtttctggatttgataattttctcccaggggttgcattcaaataccatgacatatctcctagtaccatggctttccatatctcgtatagcctcaatttatacgtttaaatccaaactcatattttttgacaaggacagtctaccaatcctctctgtccaaatgctggttatctttggtgactcttggctcttcgaggtggccttgtgataagtctattttcacacgtataaagccctcataggagatacagcacccaatcccaatggaaaacttatactttggacttttataaagtttagacaaaagatactcgtacttgaagcgatagctggaagatatccgcgtgagacagacttcgtcagttgctacaaacaggtttattgggaaggggagagacctccccagtcaaacagagaatgggcgcagtcaacgaggaaggtgctcagctcttcaaactccccgcgcgtaaaacatttctcttcctctcctcttctcttttcgcatctcatcccatccacctttcaaaacagccataaccatcacaatggaagaccctctttcccggggggaaaccccaaagaataagaaaaagcggaacccaagcttccgccgatatctacgagaccatggaattgatgtcgtaagtacttatatctactctggtctcaacccgtcgaggtcttctgcttgtcccatcatagctacgcatcgtatgatctgaattaacattttggttgaattagccttcgcttgtgcagggagtacgtgaccctgcgcttcccctaaagcgcaagcgtaatcatcgccgctataggcaaaagaaggcgaagaagataggtatgttttatggtatatatgatactgggtagacgctaatgatctaaagagacagaagctgccgcggctacccaaaagaatgaggtagctgaatctgccgactcttcggctatcgcgaagagaagtttctgcctcatctcgccagttacagcgccctcgcctgccgctccctcacatgccacgccctcgccttccaagccctcgccctcgcctgctgtcacttcgcctgaaaatgtgacattgcccatccgagggcttcgaaatccctataactaactaactggttagttaattctagtctccaagaatgaagcttttcacccataaaaatgcagacatgtccatatttctaggtggtttccaagacagatgaagctattcagagatcacctaatctacaatagattgctaccatatgcttcatgtttgcttgctcgcttactgtttgcatgtctattagtttgcatcacatagattgtttgctagatagctaagcaaaacgttcgaggttaccaacttttgcaaagggtcagcgatatcaactggctgcttccaatttgcaacttgcctcttctttctttctccatcctagttattttgtattagatgcgctcctctctctttgcaagacctggcacataaaaggagtattgtaaatctaacacccccacagaatgaaaagcaatagtggctgtaaagaggagcaaccagattatcaagatcagtgagtcttgagaccgtgtgttctttgttctttactaggcagtatatcctaatcatgtaagcaatatactttaaaccatatagggtacatatggcaagatatgttctgtttttttgttacagagtgatcaggagaagcataacgcatcgtctgagcaggtaggtgaggtacatggtgaaaggcgagaatggtgattggatggagtatgaaaaaccaataagaatccgtctataatactgactttgatacttaaccaacaccgctcccttctgaagttctacttttggcaacttatttctctgttgtctccatgacgaattactgcctggcctgcttaaatctcctatctatcgtttatttcctcctatacaattctctgttgttgtttcatcgccgccaccctctttgacctcggggaatatcatatcttccaccagcagctctggctaacagaggaaacgggctcgtttcgattatattcggtggctcatacctctatatggtctccaatacgctcgagcgaggtttgatttccaatttaacataccgatctcttgctagtgttcagttatcggtactagttttacaatgcaggcgcttcataaccgccttgtgatcgacaatcggatccacgaacagcttttggagtctacatccttggccatttttgtcttcaaacgttaaggttttgatgatttgctcctcagcaacacagttattttccccagaagccaaaaggcaataatgcttttccgaacatatccagtttacacgccaatccgacgaacaatgcatcatatgtcagtgagggtggaagacaaagaatgcatgccaacctgaatacaagtgttattgtcgtaattctctatgaatcgcctattacaaccgttgtttctgaggaccttctgcccgagcataagatgctacccaaacatacgatcatcccaagaaatgataggcggcgactttaaggtgcttctgatggtagagttactccttattcagaattgtttctggatttgataattttctcccaggggttgcattcaaataccatgacatatctcctagtaccatggctttccatatctcgtatagcctcaatttatacgtttaaatccaaactcatattttttgacaaggacagtctaccaatcctctctgtccaaatgctggttatctttggtgactcttggctcttcgaggtggccttgtgataagtctattttcacacgtataaagccctcataggagatacagcacccaatcccaatggaaaacttatactttggacttttataaagtttagacaaaagatactcgtacttgaagcgatagctggaagatatccgcgtgagacagacttcgtcagttgctacaaacaggtttattgggaaggggagagacctccccagtcaaacagagaatgggcgcagtcaacgaggaaggtgctcagctcttcaaactccccgcgcgtaaaacatttctcttcctctcctcttctcttttcgcatctcatcccatccacctttcaaaacagccataaccatcacaatggaagaccctctttcccggggggaaaccccaaagaataagaaaaagcggaacccaagcttccgccgatatctacgagaccatggaattgatgtcgtaagtacttatatctactctggtctcaacccgtcgaggtcttctgcttgtcccatcatagctacgcatcgtatgatctgaattaacattttggttgaattagccttcgcttgtgcagggagtacgtgaccctgcgcttcccctaaagcgcaagcgtaatcatcgccgctataggcaaaagaaggcgaagaagataggtatgttttatggtatatatgatactgggtagacgctaatgatctaaagagacagaagctgccgcggctacccaaaagaatgaggtagctgaatctgccgactcttcggctatcgcgaagagaagtttctgcctcatctcgccagttacagcgccctcgcctgccgctccctcacatgccacgccctcgccttccaagccctcgccctcgcctgctgtcacttcgcctgaaaatgtgacattgcccatccgagggcttcgaaatccctataactaactaactggttagttaattctagtctccaagaatgaagcttttcacccataaaaatgcagacatgtccatatttctaggtggtttccaagacagatgaagctattcagagatcacctaatctacaatagattgctaccatatgcttcatgtttgcttgctcgcttactgtttgcatgtctattagtttgcatcacatagattgtttgctagatagctaagcaaaacgttcgaggttaccaacttttgcaaagggtcagcgatatcaactggctgcttccaatttgcaacttgcctcttctttctttctccatcctagttattttgtattagatgcgctcctctctctttgcaagacctggcacataaaaggagtattgtaaatctaacacccccacagaatgaaaagcaatagtggctgtaaagaggagcaaccagattatcaagatcagtgagtcttgagaccgtgtgttctttgttctttactaggcagtatatcctaatcatgtaagcaatatactttaaaccatatagggtacatatggcaagatatgttctgtttttttgttacagagtgatcaggagaagcataacgcatcgtctgagcaggtaggtgaggtacatggtgaaaggcgagaatggtgattggatggagtatgaaaaaccaataagaatccgttggttaagtatcaaagtcagtgtggtaggagtaaggacacccagtggcctagtcggtaagtctatcgagcagtaccgctctagactaccctctaggtcaactgcctggtttagaacactgtcgagaatttcgcactcacggctctgggttcaaaccacttgtccactttttttatcctttttcttctctctccctatattaggaccatatagaggtatgagccaccgaatataatcgaaacgagcccgtttcctctgttagccagagctgctggtggaagatatgatattccccgaggtcaaagagggtggcggcgatgaaacaacaacagagaattgtataggaggaaataaacgatagataggagatttaagcaggccaggcagtaattcgtcatggagacaacagagaaataagttgccaaaagtagaacttcagaagggagcggtgttggttaagtatcaaagtcagtattataggagtaaggacacccagtggcctagtcggtaagtctatcgagcagtactgctctagactaccctctaggtcaactgccaggtttagaacactgtcgagaattacgcactcacggctctgggttcaaaccgttcgtccacttttttaatcctttttttttttctctccctgtagtagtctctacggtataaaacaacaatatggtagtcttttaatagacactggcttggtattgctcttccccacggacaataaccatttattgatgtgacgcgctaacatttctattaagggggatagaagagaaccataacataaagctgtgatacgacgcgaaatggtttgtttagatagatccttgcctaagggatagctatataaacaggaagcttcccaattttcaacttgcttcttctttctcttcatctaagttattctgtattgtgtgcacacttctcttgcaagacctgccacgtcacactaatctgtatatacagactctcctaccgcggcatgctcgctctcgccctcaccctcgcgtactattttgccttcctttagatgcacggccgctaagtctccctcacctagtgcccgtgaccatgtgggccaaagaggaggctagcccatcttctcagagtatgcaagaggagacagaggctgatgattttgtgtgggatgccgtggaccctctgggtctccttgaataactggagaaactccctggattgatatcagcagggcttctcgattgggagatgggttgttgggggcctagaggggccatacctcattcttgacatttgtttgggatagagttatgaggctccatcggaaatctggtccgtgcgtacgaaggtgtatagtggccaacagtcggatgcctgattttaatggttttatcgcctaattgggactagctcttaccagttttagaccgcctttgacaccgctcaataccatcttttgtaagtacacatcgaagagacgaaactgttaccatggggtaattcaaatgccttctacctattttaattctcaaaactacattcaaatattcgccacgccggagccagaggatacggagagtttgaagtttatacggtcggtaggaatggggactttgtgttgaaatccaggcttggctttccaaccgttttgggccttggtgtcagttgcgctattagcttttctccgggaaagtgcgggactacggcgggtatgaatggctttaaatacaggagattcatatagttggagggccttaacgcctaggatcgatgagaaatagtattttggggggggggggggggggtatgcaaactttctttttccaatttttaaccnnnnnnnnnnnnnnnnnnnnnnnnnnnnnnnnnnnnnnnnnnnnnnnnnnnnnnnnnnnnnnnnnnnnnnnnnnnnnnnnnnnnnnnnnnnnnnnnnnnnnnnnnnnnnnnnnnnnnnnnnnnnnnnnnnnnnnnnnnnnnnnnnnnnnnnnnnnnnnnnnnnnnnnnnnnnnnnnnnnnnnnnnnnnnnnnnnnnnnnnnnnnnnnnnnnnnnnnnnnnnnnnnnnnnnnnnnnnnnnnnnnnnnnnnnnnnnnnnnnnnnnnnnnnnnnnnnnnnnnnnnnnnnnnnnnnnnnnnnnnnnnnnnnnnnnnnnnnnnnnnnnnnnnnnnnnnnnnnnnnnnnnnnnnnnnnnnnnnnnnnnnnnnnnnnnnnnnnnnnnnnnnnnnnnnnnnnnnnnnnnnnnnnnnnnnnnnnnnnnnnnnnnnnnnnnnnnnnnnnnnnnnnnnnnnnnnnnnnnnnnnnnnnnnnnnnnnnnnnnnnnnnnnnnnnnnnnnnnnnnnnnnnnnnnnnnnnnnnnnnnnnnnnnnnnnnnnnnnnnnnnnnnnnnnnnnnnnnnnnnnnnnnnnnnnnnnnnnnnnnnnnnnnnnnnnnnnnnnnnnnnnnnnnnnnnnnnnnnnnnnnnnnnnnnnnnnnnnnnnnnnnnnnnnnnnnnnnnnnnnnnnnnnnnnnnnnnnnnnnnnnnnnnagatgggggggggggggggggggggggggggggggggtatgaatagcttcatgtttcaactttcaagctgttctcaatttggtactaggagatctgtcatagtaattcaggtattttaatttcctgccggtctaaaattggtaagagctagtcctaattaggctataaaaccattaaaatcaggcatccggctgttggccgctatacaccttcgtacgtgcgtttttttgataaatgcaatttcaacgtcttcctttaccattttcattgagtttttggtctttacttaatcgtaattaaaaaagcagagctacgagctataggtagagactatggaagagatctatcaaatatcttgtttgaaagctcgagatattggcagtattcgttactatgaccgattatcacgtgattgagattggttaagtaccaaagtcagtgtatagtattcatgcgaaacccagtggcctagttggtaactcgaccatgagccatacctgctctagaaggaaatatggtaatcgtccataaaaacattgtaaaataatatgaagaagtctacgggggatagaaccttggtggtgcccttataataaatttatcaacgatcaagaaaaatagatctaatgctataatagcttctaatttaaccttatgtattctgttatgttctgagcaggccatatcttgcgcatgaaaagagcacgaagctcacccgctcatttcatgacgtgacagaagttttgatcttggtctttttctaatcatggtgtgatgaacttgaaaacatccatgaggctttgtaccgaccttgaagttcaccaaaacccactgaaaccccctggatatcagaactgggccaagtgagcaaaacttggacgagttcgaaagaccaggataagtaaaggaactcaaaccctcttgaagtattggagcattaaacccagatcctgtacgatgttatcagaccgtatccaagttgagatgtgatatgcccggaggtaactctagtcagtaagtgacagcgaagataattctgagcccaagtgtgcaagtggcgcatggagacatcctagctgtgtcatgacctgaagaccccagttttcagtatttcttccgccaccatcgtttcaaagggcctcgcttctagcccacgagagtgagagcttgttggcgaatctcgcagatgtatgggctcacaaagcgacggacgatgcgtgatagagtacagctctagaaaacatcaattagagtcactgtcttcgagaaatcaatgacacttatcatgtagtaattcttcgattcttctgatgataaaatggcagcatgtgttgtagaatattccaatattgcgtctcatcttacaatggagttggcctcgagaatgcccaactgatagtcagcatatgaggatccagcccggttctagatgaaacttggttgacgactgatgaatttagaagtggaataattgtgggagagaagagaaagagaaaaggcgcaaatggagacagcaagcatgagcaaacgagcgagactgggttttgtgcccactacgccgacattttttgtacgctctaatctttttctctttgtttacgacccaagaaaacagatttacacgcattgcaggaagttattgcaggcacaagcttcagggcaaactatcatattcatgttggccttatgttgacatggtcttcgtccaccgacttgacctcggtatagacgagagtgtgagctcagtcacaaccaataaatctcatggtatgttaattgattgaccatgagagcagaacacttccaagtctaagctgaaacccggtgttgcgggggttgaagtaaatcggggactatcgcgggaccgcggacttttgtccgcccaactccacttcttatcaatgaccatacaaagtactccagaccttccagctttcctttataaagcgatagtacgcatggcgcattctctgtttttacgaaatcccccaagaaagtatcttcaacttgtgaagcctctcattttgaaccctgctcgaacactttcttcatcacgtatacaagctatgttgacaacagagctctctgagactcaggtctctgcgctcagggctaacaaggagcgcctggccaatgatcttcatcattcgtgtcaatggggatctgggatcaggtggggagagtaagatacaaccatattttccaaggcgactggagaataaccgctaacaaaagcctcggcgacttgatagtggacctacagataccggcatgcagcgcctggcgatttcagaagatgacaagcacgtccgtgattggttcatccggactatgaaagatctcaagtgcaacgtcaccgtggacgagatgggtaatatctttgctgttcgtcctggtcggagagcggatgtacctgccacctttattgggagccatctcgatacacaaccgaccggtgggcggtacgatggtattctgggtgtgttgtcaggtatcgaagtcatcaagactatgaatgacatgggtctggaaacggaaggcggagtcggggttgtcgactggaccaagtaagatcccacgttcaacctggacaatgatcatcactgaccgtgtccagcgaggagggcgcccgattcccgatcagcatgatctcgagtggtgtatgggccgagtgcatcccattggcgcaagcacataatctcaaagaagtcccaactgtggcatcgctgccaacagcggcatcagcaccagagactatgaagagcgccttgcagaagattggttacttgggtgatgtcccatgctcgtacaagtcgaccccgatggccgcccatttcgaagtgcacattgagcaaggcccatacttggtgtcggcaaaccagcgggtcggagttgtgacagctgtgcaggcctacaaatggttccgtctcaacgtcatcgggcgagatacacacacaggaaccactgcctttgaacatcgagcagacgctctctatgcattcgcccagatgatggtgcgcgcacgggaagtggcagcttcgaagggttgtctagccagtgtcggcattgtcgaagcgaagcccggcagtgtgaacacagttcctggagaggtgagctttagcttggatatccgtgggcctgagacagagctagttgccgaagtcgagaaggagctgcgcgctgatttcgacgctattgccgccgctgagggtgctggtattggtaaaccttgtcgcgttgagtggactctagacttcgactcacctgcaatcaagttccatgaagactgcattaagtgtgtggagcagtcagctcaggctgttgtcgcagatgcttctgttgcggatacaaagtcacttgtgcggaccattatgagtggtgctggccatgacagtgtcttcacttccaagcgtgtcccaacgagcatgatttttattccatgcaaggatggtcttagtcatcaccccgaggagttctctactgccgatgattgcgctactggagcatctgtcattttgcaggctgtagtgcgttatgaccggaagagattcttgtaaggcggatgctcactttaaccgaacagaaacgccttgtatatagttcagaacgtttaaatacgtcaggtatattaatgcatattacaccgagattagcttcgaaattatctactccgtcgttgctcaatcagtgtgacgtacatagagtgaatgcgttctccaggaatgcaatagatcgactagtcaagagagctcgaagacctacactaagttcactaatagaccattgtcactcatgtcataaatttagcaatgagtgactatgacaatctacatcaatccacatggatctacataatgaaaccagtggaaacatgaatttcttctttttattttgtttcctgtatccccaagtcccagtgaagctggaccgagatctaggtgcaccgagtgtaaggcccatttcgagaaacctctagtccggcagccgaattcgggtacaccatcaagactctagattgaccgagaagtggttgacaggacaccaatgcctctcagcatttactcctggggagcagcaccacggccacggccgaagccaccgcggaaagagggagcgaactcgccgggggcaccgccctcctttccaccctcctcgcgacggcggtaaccgccctcacggggagcacggggaccacgacgctcaccgcgctgctcctcaccgcccatcatgccgcgggggggagcgtgggaacgctgctgcttgatgtgggtggcggggacaacctcggcggggaggtggagccactcacggaggtagtccagaccctgttatttgattagtatttggacatgtgagcgtgttagatgtagacgagtcgtacctcgggggtgagggtgtagtagtagtactgccacgagaactgagtcttgacaaagccgcgggagtccagggactggagggccttgatgacatagaggttcttggtgtcaatgtcaccgtgcttgggaaggttgaagtccttcttggccacgagcactccctctataatttgggttagtgaatccgcacatgacgcgagcgcaatgtcgcagtgtcgcgggaacgtcgacgaaggttctcgttacataccacggaagaggtactcgtggatcttcttgcggtcgtccttggggataagcctgcgccattgttagtaaatgtgtcgggaataatcgtaagagcgaggatacgtacattgtcgcgagttcctgttgcaagtcggggaatcgctttgacaacgcccgaaaataatggttgatttaaatgatggatgaagagtggagcttcgctatgagaaaagtgcgtcggtccgaattgggtgtagggttatgaccctaatcagcttgtggttcaggtcacatgatacaaccttggaggtgatacaccatcacgtgagaggaaccataatcgctgactaagaatatgattagtcatcctggctgcggccatctcgatcttatcggaacatcgtccatcttctaatacaactatactttcttcctaccaaactcttcagttgcacgctcctactagtatatcgtgaactgtttctgacacacaatatggcttcctcaactgtcaacgttctgttgtcgtcctttccgggactgtcgctgccggcgacactttcgttcattttgccatcgacagcgagcacatcagacctggccgccaagatcgcttcatatctcccctcatcactctctcttcagtctctcgtccttactacaacaaataacaaacatctcacggccacctccgagtgtatccaatcttttctcccgacccgtgatggcgtctttacctccacactccttccgctacgcctgactgcccccatccgcggtggcaaaggtggtttcggctctcaactgcgtgctgccggtggccgcatgtccagcaagcgacagcgcaatcaaggcgataacaatggctccagtcgcaatctcgatggccgccggttgcgcactgtcaacgaggcaaaggcactagcggaatatctcgctgtcaagccagaaatggacaagaaagagaaagaggagcgtcaacgccgatggcagtccgtagtggagatggccgaaaagcgtcaagacgagttgaagaacggcagcggcaggcagaagttggatggacagtggatggaagatagggaggaaatgagtgaaaagactcgggaagcagttctacgggctgtcaaggatggccaatggacggataatcttcgcgacgcactcctgggtggatccagcaccagcgccagctccgagggcagtgaggaggatgcctcgtccagcgaggacgaagagagcgaggaaaatggagaatcatccaattctgttgctaggccgtctatgcctcaaaaggccgcaccaaggaagttcattggtttcgatgaggatgacgagttcatgagtgactccgatgacgagatggaggaatccggcaagggaaagggaaaggcgcgcgcttgatcttctagcaaaccaatatttgtccatgtttcacgacagcgttcttttactgctactttcagggattctccagcgcatctgtgtttcagcgccttctgtgccaataatttcagtctccgataggagttttcaatccaaattcatttactgccaccaattttagtctcactttagtatactaatccgtaaaatgacttgttgcgcgttgttgtacggcggcccgaatttaccatgtgcgctatcgatagataactgtctccaaagaaaaaagctccgcagctactccgcagtttcgcacgccatcatgtcactctgctctcgaggcgcagtgttcagaaacccgagattcagtctgctgtgtctgctcccaaagagcattcctcgatctcaggctcaaattcccttctcaaaatcgcgcgccgcgccacaatccaaaggccttgcggacctccgcaggcaatgccgatgcttttcaacaactcgccttcaacgagaacagcccctggctgagcctcaagctggcactctagccgattccctgccgttgtgctgcccaggatgtggcgcattctcccaaacagttgaggcaaacgagccaggatactatggtacatctcgaaagcagattcggaagctactcgccgtgagaaaggaagcaattgaatacagaaataaacaacaaaatgaggttatatctaccgagggaggtagcttaagcgcacagcagagcgatgccatcgaggatgcagtgccacccaagcctattcaaggtaggacatctagacaattgcgtaaggttgccattttgctgactgaagaaaaagatggagcttttccggatgaagctgtcgatcccgagaataattttcttgggtctccgggtcgaattaccgaagtctgtgatcgttgccacgacttgatacaccacaacaaggcagtctcttcgcccaagccgactattttgtctatacgaaactacctcgaagaatcaccgtatcgacacaaccgtgtctaccatatcatcgatgctgcagatttcccaatgtctctcgttccacggattcattgggctttaatgctgcaggagcaacgttcgcggaaccgacgatctacgaacgagaaatttgaacgcggaagaagacttccatcactctcgtttataattacgcgctcggatcttttggcggcaacgaaagagcaggtagactcgaagatggattatattcgcacagagctccgcgcagctttgggaagatcggggaaggaggcccgtttaggcaacgtgcacatgattagcgcgcatcgtgggtggtggactaaggaggtcaaggaagagattcgagagcatggtggcggcatttgggtcgttggtaaggcaaacgtgggaaagagcagcttcatcgaagcgtgtttccccaaggattctaggaatgtggagaaaattgaagagtgggttcaacgccgtgaggaaaatgagattcccaccttccttaaccccgacagccttctgccccccgccccccgcgaggatctctatcctgtgctcccagtcgtgtcttctcttccaggcactacagtctcgcctatccgcattccattcggtcgtggaaagggcgaggtcatcgatttgcccggcctagagcgtggtctgttggaggactttgttcgggatgaatacaaacgtgatttgatcatgacgaagcggatcaagcctgaacgttcgaccattaaacccggccagtctcttttgcttggtggtggtcttatccgcattaccgctgtgaaccctcaagatactgtcatgtcggccagtttcctgcctctcgagtctcatatcaccaacacacagaaagcaattgatacgcaggccgaagaaatcccctaccgagggactgtcattatgaaagaaggaaccggcagcacaattgcctcggccggtatattcgacttgaagtgggataccaccacctcgaatcttcccacctcgctagccaaagctgtaaaggacagggggatccctgtgccttcattgccgtatcgtgtgatgtcggcagatattctcatcgagggctgcggctggatcgagctcagtatacaaatccgcagcaagcgggacactgaagacgaaccttcctatccgcaggtcgaggttttcactcccaacgggaaacatattgggtgccgacgtccgattgaatgttggaacttcattgcagagaagaagaaaatcgacaagcgcaaacagccgcggacgagatattgatttttgttgtgatttgggtatattatatggacgtgtacattaggccatttagcatagcgggtcggcgtttctcctctccgtccttaaagtggtcagctatatcaattggctgcttccactttgcaacttgcttcttctttctttctccatcttacactccttcttccatcaagatcgctctggcgccttacaagatggaaaacattttcgatcttgtttttcttctagacacagacattccatttctgaaatcaggtaaattgcactccagaatcctcatatcactttgctcgttgtcctaacttcgaatatcgcttctagattcctgtcacaatgatcgaaaagggttatcggtaaaaaggccgcaaggtctaatctcccccctctcccaataggggctcagttatcgacaaatgcctgccaagtttcagatcaagatcacttatgcatttgagaccaatgcgtcagccggcatatttgtccgaatgacaacccaaggccgaagtttaggctagagcattatctacatactggggatgtaggggatgttgttgagtcttatatccgggcggggagatacagaccgcatgaatggttcatgcttgaagaccttggggatgaccaagaacgttctaagttgacaaatatcaattatcacatggaactaaccagttaacgattcatagcccgcagaatggttctttccaaaggtcctcattttgtacgtagggctcgtaggtgggggatcaacctttcgccttccgacaacatacgacgactcgcttatttattctgacaagattcttttataattgctagatttgttcctgtgcaattaactcgtctcaatatatatatcactccctaacgttcagcaaatcagcattcacgctcgtctatcccatgatgttatcttttcggggaagcgaaaatgccagggaactggccaagccctggcgctttagtctaactcagacctatgacccaatggagaacccgacagggctcatctcatttggcctggcggagaatgtatctacaacatatatcctcacggccggaaaccaagagctaacttccaaccagagaccaatgagagcggagatagccagatatatcaaccaaaatgtgcgtattccaattttcacttcatgcccacatagtgtccactgactgaaagaatcccgctaaatcacataggtcgtttttacacaagattctatcagctaccgcccaagcgcaccgacagctgcaagattaccagctgctgctgcagttcacctgaacaatatcctcaaaccacatgccccaattgatcccgaggacatattagtggcagactgtccgacttctcttggcagcatgctaggacacagtctcgcagaatccggggatgggatcctcgtcagcagacccatatatggccgctttgagctcgactacggcgttgaatctggcgttaaaatggtttatgctgatacaactgtggaagaggcattctctcctgcttgtgtggaaaaatatgaactggcttttaaggaatcctccaagaacattcgagctgttctgctcgtcaatccacataaccctgtcggtgagttatacatgccgcttggtccgttgattgaactgatttggtacggccaggtcgttgttacccagtcgagacactcaaggctatcacccgattctgtaataagcataacctccatctcatcagtgatgaggtatacgcttcatgcgtgtttaattctggtgaccctgaggctgtgccatttacgtcaatcctctcgctggatcttgcgggattgatagatcctaacctggtccatgtgttatatggtttcagcaaggtaggcatcggaaaatctcaatagaggcaaccaatttgacatgatataattataggacttcgcttctggaggcctccaccttgggttcttggtgaccaaaaatcggcagcttcggcaagcctgcagaacaatcctgtgagatctcgaccgagcaccacgaaaactaaaaaacgtcaaagattaactctatataggagactgcacggcgcttcacaagcagcggtgactatcggcaccgtgattctagaagaccaagctttcgtggcaagcttcacagccaaagcaagacagagcctcgcttcagcctaccggtttacaacctcagtgctcaacagggagggaatcaactatgtcaagggcgggtgagtataccaaactcggagaagacattattcaaatcctcatctaatccggttatcagaaacgctggcttcttcgtctacatcgacctgtcaccatatctgccccgtgacgattatcttaccccgcgaaaccgggagttttctcttgctgagaggctcgtcgatgctggtgtgttcttacatcccggggaagagcattcgagggatattgggtggttccgcctggtgttctcacaggaagaggagatattgcaggaaggctttaacaggtgagtcatttgctgattatttctatgtattggttcggcccgttgattgatggtttgttttgtgatttatagattgttgagtgttttaaggtcaagtaaatgaaatattctcgatgtcaccatcaagacttgaagatacggggaaagtatggcataaaaacgaaggacaatgcaatcagaggtagtgaatgcttagatgcaaaggaatagaactgaaatattgaaaatgctatatgctatatgttttatttgattttggcagaagtcatcaagcatgattttttgaaactggaaaatgagattgtatttttcaaagcaatgtcgtttattcgacgttgacaaattggaatgtaggagttcctggcacggcattctcaccggccaagccctcacgcttctcaccagtaccaacaacctcaccagtcttgccaccctcatcaacagcaatgatctcaatctccttgaaaccagaggtgcgcttcagaccacccaccatctcggaaagaacgacgaactcatcgaagggaagcttgcgatcgaagacagtggcaggggactcgccagcgttgaccagacggcgcttcaggttctgaacaaagggcatggccttcttcatctcaccgaacttgccaacctttgcgctgagctccttgtcgttgaaggagaggttcagcgcgtcgaaagaatcgcggaccaggtcaatgtacttctcctgccagttggggaacttcttggcaacgaagatgataagcttcttgggcttgcgggggtcgaaggcaatgttcttgcccttggagagcttcttggtgaagttaccctcggagctcatgatgttgcttgcggtaccacggacgtagttctgagcggcggtcagctcgggagagggctctggcacagaagggaactgggcgaagtgaatagactcgggctaaaaggtgttagatcaaggttgagcataaagtggggtaaggaaactgaccttattgaggacctcgagccagatgtgctcagcccagtgaggagtaatgggtgccagcatcagagcctgcagctcaatgtagcgcataatggtatcacggtgcatacccacgccagcagcagtggaagcctcacggtagctgtcacgggagctagtgaagtcatatagaccggacttgagagcaagcttgaaatcggtgctagattaaagggttagttattgatgtcaatgaattaatggaatgcgaagcaagagtgcaaagcagtgaagtccacttactcctggtagtgcttttgggtctcgcgaaccaggctgttaagttcgttattgaaaagcttgtcagcgaaagcatcagcaggtccagtgcgcagagtctcgtccttagcaatctcctcgatccactccttcaaggtgtggagacgcaggatgttgctgttggcaacagactcctcaaagttggcatcttcaatgctgtcaccagcatcggcaaatgcaatacgggtagcatcggcaccgaacttgtcaacggcatccttgagagtcaggaagttaccggtactcttactcattttctcgccgttgaggagcaagtggccgttagcacggacaccacgaggccagtattccttggggaagagagcaatatggatgtagaggaagaaggtcaagtggttctggatcaggtcctttccggagacacggacatccagagggtaccagtattcgaattcacggcgcattttctgcagagattccttgctgattccactcttagagatgagttcgtcgctaatttcccttcttgtgaaaacgtagtcccagacctcatcggtcatctgttcggcggtcacgttcagggagccggtcgtcttgccgtaccggtcaccgtgaaggaggtgggcgatggtgtagtaggccatatagacggtactgtcactcagactctcaactaggaactgcttgtcccatggcagcctggatccaagaccataggttctggcacatgcccagcggttcagccaggaaagattcttctcgaacccgtttttgcattcggcggagtaggtgttgaggttgttgacaacgtagttcagggtctcctgctgccactcggcatcattctcaccgtagttcaggaaccactggcccaggtaggcaacaacacagtcgtcaccactacggctgacaaccttgcccattgggtcggcgaaagggaaggcatcaccactgtcgtagaggtccttgcggaccttgtccttagcctcactgacaggctcgcccttatatttaccaactagcatagtacccttgtagaaaccttccatgtaggccaagtccttggcctgagcaagctgggtgacgtccttgggagagttgatcttcagctccttgaccagagcaggagcagtcaagctgccgtaggtgggagtgtcaatgagcgggaatatttccagctcagcccactccttctggatgccgtaatactcagccttcttcgccaaatccaccagggtggcgtaatcgtcagggctgtcggagggaacagaggtaacaacaccagtacccttggctgccgaaacactttccatgggcaggatgcgaataccctcggtgtggaaagacagaggtgcattgaccagtgttccgacgaaggcggaacccggcacctcgagaaccagcgggagctcatcttgggtcttggggaacttatcgccgaagaaatgaccctggaaggccatgttccaagcagctcgcttggtaacaacaatgtattccttctccttgagcttgaaaagaccgtagttgatcttgggaccgacgaagcagctagtctgaccgtacatggtctccggacgcagggtagcaggaacgaagtataccttcgcgtcatcctcgatctttcctttcacgagctctgcaattttaggcgaccactccttgacctggagcttgatcgcggagtattcctgaggaccgatgccctcaccctcagtgcggtcgtggtccatgcaaggctgaccgtccttaggcgagtagatggtgtaacggttgccgtacatgatcttaccgagctcgtgcaggcggttcatctgccaacgcacgaaagcatcgtagtaggggttagcatcggtggtgacgaactgtcggcgccaatcgatgcgggcaccgatactgtcgagatcacggatggcaagaggagggaagtgttcgagccagtgggcagcgtcggcaaacttgtgaatttcctttagaggaacgccaattgccagcatgatctggaactgatacttcatcttcacggtcttggcagcggccttgctcttcttgccagagaacttctcacctgcctcagtcttaacttcttgtgtgggggctgcgaggaggtcctcggcggcctctgcctcctcattgtatccttcgaaaccctggccgaacttcttcacctcgttggcaagcttatcggcacaagccttgataggcataccggtgcagtggaagcccagagggaaaagggctcgcttgccctccatgcgggcaaatccagccatgaactcgaccttactagcagtaaagctgtgtccggcgtgcagagtaccgttcatgtaagggtaggccatggtaccgaagaacttggggtacttctcacggagctcggcgggggtcatggcaccctggggggattcctcgaatgagggcgcatcgacttcgaaaatcttgttctccttccattgtgcttggtacttcttttctattgcgactagggtgtctcgcttttcggtctggcaggcgagatgatagttagtaaataaaaatcggggatggtggggagggaggggtatagccacattttccaatttgagggtgttctttgagctgttgctcggatcgagctcagctgcggatgcaactgcggcggccatttttcctgattgtcagaattggcctataattcccttggagagcggaggggagcaaaagaagcgcgaggcgagatataaaactgtttgctcggtttgttcagtttgtgagtcagtgtaatacgagtgtactgtattttacggcggattccacactccagatgtcgtttagaatgctgcattggtgtgtaaaagaggtgataagtaagagatctgaggtaatatatgtatataaatctagtcaaaagatgaattctcattctccttttgtctctaaagtgagtttcaactaaacgtcttctatgtgaccggatcaataccatctatagattggaggtgcacgtgactatcacggagcaacttcttcgccgacaagcgcatctgcgataaatttccccgatcaacaaactcgcaattccggacctatattacctgttattgagcaattatcttgccaattagtcttctacttttgccttatccctatacccgcacgtctcatcgcataagggccagtccctgtgcggaacagccttcatcatggtcaacttgttcaagcggcttcgtaggctgcaaactgtatgtatagcttctctcagctctccctacccgagcttctcaatgtaacgcagaattgatatactaatgtaaaattgtttctgtcaacagagagtaagcccgaaaccccgttcttcgagatctccgaccctgcaacctccgaggccgaactcgtgtctcccacagtctggccgatatgcaatcaatcaactgactcgttctttcactgttgcagatgctcgaaaccaaagttggcacaggtgcagccatctttcccagcctcacctccgcatcaaaagaattcccagccgtcacccgactccacctcacatatgcacgcaagatcgaccagggccacggaggcgcgcggcatttctggcgtaactgtcttccgcgactgaaatatcacaacccaggcgtgccgatgactgtggcacaaacctccaaccagcaaggacccgcagcattgacaatttacttcgccgaacgggtcggcagcgccgcagcggctctcgcaaacgaaagaaaggtcgtcgatgagcttgctccgacccccgaggccaatgagcaatcagctgttctggatatcaagaaccgcacgtaccaacaaatctgggatcgtgtccaggccatgacgggcgcgaaggtagtccccgccaccagcgaagacatcgcgctggcacagaagttggcggagatcaaaaagaaatcgggcccggatcgcgaacgtgtccaggctatccggcaggcgaagaaggatcaggagcgcatgctcgctgaggctagaggccaggtggataagcaagtgtaagatagtgcagttttgttctagtgttgtctttggattcggttgatccatccaactggtttcttcgtcttgagaaatcggctgtctgtagcatagcatctttttcccgttacgactatgtactatttcttggaatatctttttaatgcgcatgtcgcattcccttgttactcaaattgcgtgaacactgaagtagatggaggcgcataggcatcaaatagcaatagcaataattgtagattcaacatctcgcaatatcaacgctaaagtatgaaagacggcctaaaacagatgagaaagacatcaccccatgcaaaactatgaaatgtccgaacaacgacttacagaagagaatgcattcgcgagaagtgttacatgacctagaacattgttagcaagaagaatcattacctggtaccaagtcaaatacatacttcagcgattgactgccgctcaatgattgatttctgtctctcgttgcgcgaaacacggtagtaatagtcggtaaagtcaccacatttcatgtggcgcaggaattcttcatcgtgcgtgatgacaatcaactggaaattagcctgctgttgacgagtgcggataatgtcatgcagcgactccgccagagagcgaatattatctcggtccaggttcgtagtgggctcatcaagagcgatgagaccgcaattgacaccgaaacattccgcaagggcgagacgaatgatgatactagctaggaccttttggcctgcactgcatcgacctcgcatgtccatctcggcgcctgacttgaccatacagacgcggtagttgtatgatcgattgcccttggcgttctcgttatcagaccggatgaggattgtgtcgacatctgttccgcgatatgttttctgccacagttcgccagcgatagcgttgatttccgccatcttcaggccgtggtattgcatgattgctttgtcaagagcgccaccgtatcgagccaggtcttccacggcggctttggtggtctccactttgatgtgggattccttgtattttgaggatgcatccttataatctgtgttccagtccgctagcagctgcatcaactgatcgtccttggacttcatttcgcccatcttgctcgcctgtttggcagcaagggcattgtgttcacgagtccagcgttctgactcttgcttgaaacggcctcggtccacttcagcattttgggcttccaagtgctcaacttcttcagcaactgtgttgagagatcgagtggcttggcgatatgtcaagttgtcagagtattgccgcttggtgttttcgctgtccttgagttgggtcgagattttgttaatctcccttgtgatctcgctttgatcggcttcgagtttgccaatttcagcttcgatttcttgaagctcctgcttgcatcgttcaagttggcccagacctccccgttgattgtacgagttgatgtcatcattggcaaggtcaagctgattgatgttctcagataagcggctgatctcgtgctgcagatctcgttcacgctcgtcggctcgctggctgatatcatcgtaacgggcttgggcttgaagcaactctggcgtgagactttcgatatctcgatctgccttctcaattgcgtcccgctgctgattattgagtttcttgaattctttaatccggacgatcaggtccgctttcttttccagctggaatttggcattgtctaggttgctcttcacatctctgaattctagctcgagcttgttgatctctgaccgtgtcttttctttctcatttgtcacttttgttagagtctttttcaactctcgtgacttttcattgatgaaagcaatttcctcctgaatgtcttccagggtacgggcagttgaagggtcttgctgctttgcagaaagctcttgaatttgtgatttgatcgtcttgatctccacatcgtaacgcgcgatagtgctcactgtcttagcaagcccctcgacatcacgcttgctttctgttttctcgctgacctttccgtcgtgggtttctagcttctctagaagttggtcacgctgggattcggattcttgctcctcttgttgaagctccgggatgacggtctctgacaagcggacccaggtgtcgtatgatgcactagcagcgcgagcagtttcgagatcttcttcaaggctcttcagggtctcatcttcggcatcaaggccagccttcttgactagggcatccaacttctttgtgaaggtctggagttctgcatcgttcttgaacgatctttgacatgttcggcacagcttggtacgcttagcagcatcaagacattttgtaagatattctcccattccggcatattgatcagcgtctttgcgagcgagatcatactgtgcctggcgctccttcacaatttcagggtattcggaaggctctgcgtcgactgcttcgtggatttccttcacgcattcatcaagttccttttgacgctgcttgaggttcctcttggcagtcttgagcttgaactctacatgctccaattctcggctcacgccgtcgcgctgtcgctctgcatcggccacctgctttgattcgctatcgagagcttgttggaagcctcgctctaatgtgtccggcttccagtcgggaccaacgaccttctcgaggcgatcgctatgagctcctctcatcgtctgtaggctgcgttcgcggtccttcaattctttcttgaggtggtctaagcgagccaagtccccagccttcttggttgattcaatgagctcggtattcaatctcgagctttcatcctcaaggcgccgaatttccgcattggtatcctggatatcttgatcccaggaagcagttttggctcgctctttcgcgtgctcaaggttcgaagtgatatcctccacctttgactcaagcgcagcctgtaggccctcatcaacttcgatttcattgagctttttttgatgggttgttgcctccttgtcattcgcagcaatctgtcgttttgccgcgtgcttggtctcttgaagggcggacttggtttgcccaatctcattcaatttttcttgaacctcgcggagctctttctgggcttcacgcctcacacgatccagagattggttctggtcttttaagaggcgtttgatcttctgcatgaaggtgtcaatttcagactgatccatcttctcgccaataccacggatgttgttggcacgagcaatctcattaatcatgttctgacgcctttgagactgacgctcaaagttggccttgtcgttctcaaactttccattctcagcttgtttcagcccaaggcggtgccgagtctgctcaatctgctccttaatttccatatagctttccttttgtgactcttcttgttgctggtattggacctgcttcacttcgaattgctccagggtagattcaagccattcatcggactcatcaagctcaactagatgtctcttgaggttatcaatggtggtttggatacttttagcttcgatgcgcttgccctcaagagcaccgagcacctgggcataactttctgattgcgtccaagccttatcggcaagctccgcgacgcgccgcatctcttgtgacatccgctgggtctcttcgcgcaaggcctcgatttcctcttgaagcttgatggatcgtttttcagcacggtctgctttgtctttgtcttctttcgcatgttgctccataatcttatatttgccaagctcctcgttctgcttcttccgcagtgctttgatgttgtcaatagccttggtgtacttcatagcctcaaatatttcgtcaaacctctttttcaacacagacggttcactcattggccacagactttcgtcctggtggcagaaaatgaccgaatccagtacggcctttgagacgcccagatactgcggcatgatttggtccagctcagccactcgcgatgaaatagctgtgcgctcgccgtttttgaccataagcagctggccttctagggtcttctgctgtcgtgtggttttcttgaccgtaagctgtagactgcgcgtggcaaccattttcgctccggaagtggccttgaatgacagcttcacctgggccagtacctctttttcgccacatagtttcgggtcgtggatgaaagcaccgcctttgctgttcggaggaagatcgcccgttgtggcatatttgagacactcgatgatagtctagatccacgtcagttccctgctggtcgcaactctagtcgtccatttcgccatttcgtactgtttttcctgagccattgtaaccgacaatcaatgtgagaggtgtgtggaattggatcgtttcgctgcgcgtattatcgaaggagcggactctagaacaagcgtggttttatgagcatgagtgtaattactctccgcagtggccgcactcggatcaaaagctttgagagacgtaccccagtatagagagcttatcaatcttcgctacagtatgttagatgaccgtttgttccttttttttcctcgccgagctatagttgttgcacttacacctaaacctcagttagcatcgcgacacgagacgggaatgatcggcacgtacatttcgaacaaaagctatgagaggggcgtgtgagcccgttggcctttagctttatcgaatacaatcgaataaagagccaaacacagagagagctgagaaacgaaagtgctcggatcgccgttgaatgtgattgatcacatagtcccgcgtcgaggcgacacgaaatcacgtggattgcactaaagtgctgcgggcccacagggatcggcggctctttgtcaaccagcaatggccggctcttatttccagagttctgtcttttcgaggagatccagaccatcagtgagacgatgtgcatattctgagaggcgcatcgtcccaccccctcttgtctgaatgaaccgaacgtactgtctcgaatctggagaatgaaccgttccattttcaacgctcactctactatatccgtcccctcgtgcggtcatagttttttgagggaaatctcgtggctcttcatgagacgtcggatccagacgcactcgaacctattactagtgccattatatctcccttttaatctctctacactgcgctcgacatggctctgagtcgcccacaaccctatgagggtatgcctctacccaactaccagatgagatcgggctccaacgaggggcatccggggtacacaatggagcagcagcacgtccatgcatcctacggtgggctctatggggtgcaaggtgctcatcacgggggataccagggtgtacaaaacgacgggggctggacagaacgagttctcgatgaaatgaaggacctgctacttctcctcacaccccacggccaaatcacctatgcctcaccatcgtgcaagagtatcaccggccgtgtcgcaaaacaactcgagggaagtgctctggcacattacattcatcaggacgaccagccaatcttccagcgagatttggacgaatcggtggttgcgaaccaatcgttccggacccatttacgattccacaagaccaacggcacatattgtctcatggaggcctatggacacccacatctcgcaaaccaggatgagcgtgcagggagacccacgccggccaacgggcgctgcaccggatttttcctcgtgtgccgaccatatcccagcaaggtctctcaattgctcgactcttttttggaacacaagattgagaacgcacgtctagtccaacagattgccaaattgaagcaagaagaagatgaagaggcgaccgcgactcgagtgccctattctaggagcgaccaggatattcgtgcccccgtggccgaaaaccgattccaacgattcgctcattcgggggaaatttctagtgaccctgatactacagacaccgtagggccgaactcggatgaatccgacacgagccaatcgacgggctatttcgcagagcccaatacccgcgaagtttactcacatattgacggcatcgaagtcatgaccggtcttaactacgcagacggcgagagatcgcacggtctcagtacaggtgttaaccgtggccgtcttatacattgcgatattgacatcaccactgctgctgaccaagagcgcaacgctcaggaaggcgaccgccgtaaaaggctcaaggcccagcatgtctgtagcgactgtggaacagcagactcgccagaatggagaaaggggcccaacgggcctaagaccttgtgcaatgcttgtggctgtaagtattgtcccgtctgttgtgacccccgctcagcttgcttgtaacctgtctactcttggcacggaacgagctaacccaattgtctttctagtgcgctggtctaagaaggagaagaaacgccaagagtcggcctaattttcagttctcggtttatttgcttttcttgggctggtggcctgccaacccctcagttgtccgggtgctttgactggtcaggcatgctgtccatttcgatgaatctacaatgatcttcagacgagccccatgctcgctatcgcatgggtgatgatcttatgtcctgtgaaatggatctctttggtccgatgtatatagctggccgtgatttcttttgcaaacattgtgtactactgcactatggaacctatgtttttttcttggtaattcaaaatttcattatgaggaattaaatgatttgacaaagtcggagcaaatcaacagtccaacgcccaggataatgacggcatggagtatgtactgagtaggcacttgtggccaaagacaagcccacggagagggccaaaggaatgaacagaaccccatatgaacgccatctttgggccgttaaataatgaaggtgatgtatgggcaacaagacgtggtatcataaaacgcaagtggtatcataaaacgcaatttctcgacaaacaacaattcaacgagggcatttaggccctagcagccttctttggcggcggcgggaagtacatcggcgaccctgccgaactctccggactgacttcatacgattgcggcgacgggtattgaggctgaggcatacgggagttgtcccgcagtgggaggtccgatgcggtactaccattgccaagtcggttgaaggccagcgttcggggtgcgaagggcgagatatttcctccaacagccatgggcggaaccccgggggtacggggaaccatacctgatcgcggcattgggccgggggtcataggaatcatgctgggagacttgatgatctcttcttcgaactccttctcgatgcgacgctcttccctctgctccaggatcgcatcccgttcttcgggggtgatgaagcaggagtggatacagaagccgaggataattacatagtagacactgaaggggatgttagctaactgtttcctcgtagaaggggagtaaacaaatattagagtggaaagggccgaactaacaccatgataacagtcacagcaaacagtgctttcgcttgcatgcagtatccaatgttggactttttgtaggcgacactgcaacttttcgcaatgtaccacggggcccctggctgaggatgtctggggtctgacatgtcagacccagcctgatacaccgctgacacgatatagagagcgaccaaggacacgtggacggcgaccgcaacaggaggataaaacaggttcatccagtgggtaggcaattttgtgatgaggaagaaagtgcttaaaacagcaaggacaagattgtaactggtgatactgtttttaagtcagcggccacctcttgcatattgagtatgagtataatgagtaacttacaagctggaccaaaccatgggggccttgaatggtgtgtagttcgctgcagcatacaatgcctcgttgggagcactgttgaatccattgtctgctccatcttgccataataatgtctggtatagattatgggaagcgataccagtcaatgtcagcattacgatggtgatcggaaactccccagtcatcaaccaaagcacgagcttgtggtgcttatgcttctttggaaacaagaactgcattttggcgttgggtttggaaggttcgcaataaaaatcgactatattttcccaagctgaccgttcaaccgaagcgcttatggaagagttaaagctgtgtacaatatcagaccggccggctaagaccttctgtctgtcgcacgaaaagggctaaatgtttcaacgtggtagaggggtcagaaaagaaattagaagaacacaagtctgggcaatccggagggcgagcgttagatatgagctcgaggccaacaagtggccgaagacacaatccatcgcatgcaggaggggcacgaatcagcatgggaagagcccatgcgaagagattgatgtgtgtttgagaggtgcatctggccaatgcttgatggcggcaaagcgccagcgtaagtagcaacccggtcatcacaccaatgagacgacgaggatcgagggaaaccgccggtcgtcacacgctagcaggtgtgataggatggcagacctgcatgaagccctcaatcacatacttcccctcaataggatcagcgcacccttggcactttgagggaacttgcagccttccagtacgaagcgcccggcgaaccgctgctgggttgatgtgtcgcatttgtgactatgtagttgaccgtgcatatatacccatgctagccccggcgtcaggaaaatgggaacaaagaagatggcctctcattttcgaccatagccatcattaattcctaagttatcgagttctaaccttgaagttggaagtggtagttgtcgagtggcataaggaagtcatgtggtcggcagaatcccaacctgcgatctcaaatgcattacgatcatgccatcttttagggattccatcaactaaatccaagtccagctttgtagcatgatccatctcttgatatatcttgatgaagtcgttccagttgcgtccgcttgctcttcgctcagccattccaccccgcatcatccggcctagtcaacttgaattccccatttcaagaatcgcacgccaaatgagttcccagagagaggactcgattcctcatgagctgcgcacggctgcagagccccggcaaaatagactgcacccagtgcgattatcacacgtcgagcaggtcaacccctctgttcggctcctacagttcactctgactccccaagagaataatgtatggatttattttattttctcgtccgctgcctctttatatatgtccctatacccagtatcttctactcatacatcaagcccggctgccactcatggctggttgttgtccccacgccgttggatcccatatgccccgcacagtcggtggttccaatcacatatgagcatctgctatcatgcaccttcacccaatagatgtcgctgatgcattctacaggataacggtcaacagccattcagcttcctccctggccaatggcttgatgtccatattccctccaacacccaagccgggggcttcactatcacctccaccccggcagatgcggaggtgctgccgtcgccagaggcttctatagactcattagctggcgaagcgctagaaccatcctcagaatctcaagggcgaccaccatatgtagagttggctgtacaagactcgccgaataacccatccgccgcatggctgtggagaccaaaagaagagattctcggcaaggagctgagcatccgagttggcggaagcttcacctggcctcccactggagtcgatgttaatgatgttaagaatgtggtcttcgttgctggtggtgttggcatcaagtaagtgatacttccaagatatcatgtccgcgatgtatacaatcgtcatcacaaaccaagactatacttgtttcaatccctcatgagcaaattctaacacagtcttagtcctctgatatccatgctctcccacctaaacaacaacgaaccccacacccccaacccaacaaccatccacatcctatactccagccgcctaccgcaaatccagggaacagcctcggcagactcaatactaggccagatcctgtttctcccacgtctgcgccagatagtccgatctcaagaaagttcgcaccggctgcggatctcgctggaccttttccttacggacttggtctcgtcgcctgatctcctctcatctgggtctccctctgatctcaagatccaccgagagaggatatctgatcgtgatctgcgctctgcggctgtgggtattgacggtgaggtggatcctcggagcacagtgtgctatgtatgtggaccgcctgctatgactgattccattgtggagaagttggttgggattctaggggatggtggggagcagcgagttttctttgagaaatggtggtgagaatgggacgagattagtaacgacgtgatatattcgtatgcgattaattgcagtttgttagtcgatgaatgaatagtcaacgttacagttcaggctacaataagaacacaataggactaggagaaatggcttcaatatttttaaaaagataagctcccccgcagatgccgacctgacgcaggcaaggggcggaacgatatatgtacaggaaaataaaagaagggccgccggcaagaacggaacgacagtatgtgagagcaggggcagtacagacacgctggcatctcaatacaatatggggacgagaaatggaaaagagaatagagagagagatagagcagtcaggcttggttaggatgctggctctgggcccttgacggcaccgccatcgacgatcatcatttcgtcgattttggcttcggtttcaccccattctagacgcttgtatgtggatacgcgaccggggcctctgtcgaagtcgaagaaacgcactcgtcgaacgaagtcatcgtagccaccatagccgcccattccgacaccgccgccatagcacatccagagagatggcttcgcattgtcgtcttgctcgagcatgcaatagtcattgacatgatcactagagaacggttagtctttaaaacagcacaaaaggaaccttggaatggatgacttactgtccacaactaacaaacaaaacaccctcttcttcgagggcgttcttgaagccagagttgaatcctggtgcagtaggaggttccatccatgtacccttgaagtactttcctgacgtacgatactcagggagcgggatgtgaataaatgccacgttcatgtggatatggttatattcctggtgtttggatcttagactttgggcggtgtttttgaaccaccgagtttggctcggtttgatccaatcgtagccgcggaactgacgctcgtcgggggagtaagaatgcgtgtcaaggaaatagagggtcagggcagagtgtgtgcttgagccccagtcgaggacttcgacaacgtagtttccgaccccgtcaatgtcttcggggccggcggctgaaagagagtaaggtaggtcctcgtatatggtcatgagttgttctcggttgaggtcaccctcgtcgtcgtggtttccaaagatagctgcgtaaggaatcttgcggtcgaccagaagctttacagacttatagagagcactttgtgcatctggagcggtctctccgttgatctggtcaccagagaagactaccatgtccggcttctcttcgtcaaggagtcgttcgacaaattccaaggttcgggggtcggcttcacacttctggccagccaccgcttccgcgggaacagggtcacgacagtggccgagaccggtgctcatgtggagatctgccaactgcatcaccttgaatttcccattgtcgttgattctgggaacaggcttcttgggttttgcctgcggatgccctcttcggatactaagacgagtctctaactcttccgtcttactatccaggaggataggagtatctttgacttcccagttgggacgaggatcgacagcatccgctccataaaggacatcgacgtacgtcacggcgttttcggagtcgctagcatggcgggaggacgagcgcttgagccagatgcctcccggtcggggttcccacgattcgacttcggtctttgcaacaaattcagacgggggagtgatacggctaattttcaagtcgatgaccaccttgtcatcagggcccaattcctcctcctttttccgcttgaattgaacgtaggcactcgagatccagcccgagcgcaggtagaggtccttgtcgacgcggtaccaggtttctgggtctagcttacaactcgagaacggattgagggaggaacaggttgtgacggtcacatctgtgatcacgtagccggaataatgcgatggaaggtggccatggattgaagagggaaggacactgaatcgattgtcgagaatgacgaccacgaggagaatgaatgttgcgaataaaccgagctgtacgctcgctcggacctacacaaattcgatgttagcaacctgcttcacaaggagtaaaataatgtcatactagccggcgagccattatgaaatagatatcaccctggcaaggacttgaagaaaagcgaggcgccctgtcgcatgatgcccacggatttcaaatgtatagggcaaaggagaggaccaatttcggtcaactctaggatataaaggacaagtataatttgttttgggggtgaagttgcaggtcaccctcgacgcttgggccccgaaggcggtgactcctgaagagttggtctagcctcccgatgcttggtgtttggatgttggtgattcattgacttggcgattgttactcttctcattatccattttctacctatatgtgaaattcccgtctatcatcaacattcgtatgcaagttgcatgtctatacaggtccaccggaattcctctactggccgagcgaagtcttggcagccacatcgcccactgacaccttgccgctcaatatgtctttggaagtcgagaggattgtggaccaattctggaaagtcgtgtagggcattcccctgcgctggcagtaggtcaccagatctgcaacggcgttagttcagtgtctcggaatctgttacggttcgcccagataaatacctttgccttccttggcgaagagaagatcagtttctgcagccgcagacaaatcggaaacaccgtctccggcgtatagaagaatcgggcgttctccgtcgggcaatctggcataaggcttgatctccagggacttgtcatgtccgaagtggctggtgagtgattgtcagtgaggctgggggaatgatgatcggattgacatggcttacctgtcatcatggtactcaatctgccaaccaccctcgctgttgatattcttgccatctcggctcacgggctcgttggaaatgatggtgaggtggctggcgggcttgtggccgaggaacttctctaacaaggcactgatgatgggtcgcattccagatgaaaggatgacaatgggaacattgttttccttagcccagtagtagaattcctcgaagtatgggtccagtttcatgttctttaacagcgtgtcgatgcactggtcgtatggggtcttgatgctatcgagcatctcgcggaaggcatccctatagtgaagaaagactcattagggcttgcttttggaacagacagtgtctttaacactcaccggaagctcagagtctcgtcaaggacctggtcgttcaacacaaggcgcttttctcggccgaagccaatgttatcgatctgaatagcattagtgaagatctaggatttggcagcgatgcgatataccatgaagtcattgcctgcgattccagtcagcatgcaagtactagcactttgcggggaagcacctactgtcgtcgactgtaattgtcccatcaaagtcggtgaaaaagatgagcttaggcttagtctccatgtaggggagagcgttggaacccatgatcgctatatatagcaatagaaatgaatcgcagtatgtacaattcagagaatgactgaagaaaagcaggcgctaaaattaaagatgtgcccctcggtgactggggtgggtcgagcggtaccgcagcgggccagtctcagccggattttccttttctgtttattccagggctagtacttcacatttattgtttccacatcatgtctcgtctgcgccaggccctgcagcgcgtctttggtgtgactcctacaccaggcgccttgcgctctcgaaccattgacacgaacttctccattataaaaggtaattgtgtggcaacgcctcttcgcaacgtcgggctaacgaaacgcgcagagggagaccgagtcattatacacggcaaacagccctcattgtcaaaagcattgaagcgaggtgaaaagcttcagactgctcgtggagcagtggaccatgaaagcatcattgggaaacgggtctgggatacggtacaggctcgcaaaggtcaatatcctcacttctcgattcttggacatgacactgatatttttgttatatacaggcccgaacatccgagttagcctcccaacgttagaagaatacgtcgccctgacccctcgcttggtcacgccggtatgcgcatcactcttgtgaatcagacacggagatacattggactaacgctaccccagtagatctatccacaggatgccaatttgattgcttcccttctcgacatccatgtcaacactcctgccgctggcgaagtacaacccactctggaaatcctcgagtccggaacaggccatggatccttgacactacatctggcgcgagccattcacgccgccaataccactcctccgcctcgtccacctcgatcccagatcaattacctagaaggccgtgtcattagaccgagtgaaaaggacacggaacaaacaaaagagaaacccgccgagccagttgcggatccagcacaggaggaatgggatgcatggcgagcgcagcgcaatgccgtcattcacacagtcgatgtatcgccaaagttcgctgcactggccgagaaaaatatccggggattccgccgtggaatatacgcaggcaacgttgatttctatgtgggccccgttgaacactggattgccaagcagaagcagcagcggaaaaagactggcctggctgcgctgactggaggtaaccctgtagatccgttcctttcgcacgtcattctggacatgccttcctcaaacctgaggatcccacatgttactccgatgttgaagcgtgatggcctcctagtggtgttcatgcctagtatcacccagattggcgagtgtctgcaactgatccgggaccagcgactgcccctcgttcaggagaaggtgctcgagcttggctctggaatcagtggcggccgcacatgggatgtgcgttttgcgactaagaagtccggcgccgacccatcgtcctggactgccccttcagatgctgaggctgccagtcctgcggaagccgacgagcagtccaccacctctgatgctgcgtccgaggtgtccaccacagaggagcctgcaaaggaaggagagtctgtcttggtctgccggcccaaagttggagtgcgtatccagggcggtggcttcgtggcagtctggcggcggatcgaggaacgttatcccaacgtataaaacctgtactgtatacctgtattatgttgcatgtctgatacggattagacccatttgtacaatatagagaattgtgagaataatatcgagatgcccgaaaagatgtcataacataacaagagacaatcgcttcagagcttcgctttaccctcgatatccgcatctttagacacggcagtgtctatgccaccttcaccttcaacacccttagcagcctctacttcagtctgaataaccactccctccgtcccaggaactttgcccaaaatccaagccttcacatcctccaaaaagctctccgtcgtctcaggcaactcagcatgcaacttatgataagcgccctcataagaacgaagcttcacatcaccacctttctccgtcaaccccttaacaaagttctccgtcgccggatgactagtaacgcgatccccattcccatgtccaaaccagaaaggcagcccagtcttcacccaagccccatccccagccgcaaacatcccctccaaccaaataccccggtccaacatgccggccaacccctcgaaagtacccgtatcatggcacagcgtatcagccacgaactcgtcaaccacagccttattgcgagacatcaaatttgggtcaagcggggagtaccgctgcttatgcgggatcaactttgcaacaagtcgccccgctgagactgtcagctttgacgggcgggaggacgggtctatggcgattaggggggaatacagaagcacgccggtgaagttgggccgcttggatttgtctccgttgtagggtgactctgggtggaaaatgtagtttaggacttggccgccgcccatgctgtggcccattaggaagaggggcatgtcagggttggcgggtaggttttgcaggaaggagtgcatgtctgagaggacttggggggttgggcctgttttaccgcggtcgcggctttctttgacgctgcggccccatcctctggttttgggtgttagttggggtgttttataatggaataggtcgttttctttgtgggtatttatattgagatatcaggataggattcggccttggtttcacacttaccgctgatcgaaagacctgacctcaatgcctgccgatgccagtgttggaaacagatcgtggtaggcattgcctagcaagggtttttcgtcaatgactgtcttatggatggtgggttgtcttgacttattgctcataacagacatgatcaacttacagtggtcactaaagccatggataaaagctagaacagcaagtggagacccgctagtctatatagtagatcgccttgttagctttgaaactcaatacccttatcttgaggttggagtctatctcagcttattcagagagggatcacagctgtgtcgttaaatccataccttccatgtcttagtatacagctcaaggccgtctgggagaatatgcacgctttcttctgtagtcatttcggctattgaggtttgtataaaagctcgagaggtggttgggaggagacgaagtgcacggtgcacgtttcagcatgcatatacgggacctcggcaggaatgtgaagccaagatactaacgccattcagatccaccacgcccgcaattttatagttaaccctatttatacgattttatatcttaaagaatgatagtccactgcgtttggagactctatcattgacgatgtgatctagttaggcctattgtagtcttttagtggtcttttaagatatcttcacccccttcttaagttttccaggtagacagtagagaaaaaggcgagaaaaggcttgatctgaaagcactttgatataatctctaattatgtatatcctaacacaactattatacagagacaagaaaactatagcatagaatcgatacaatagtatcaaccatgtcccattttctagatgtcagctatagatcctacatccttttcttacaaaacttgccagcaatcttagtcgactgtaactacctcttcttctttgtcttttgattcatttctgtattcagtccatgatcggacggatgggtaagaagagcctccaggaatccacgggtcttcagacccacttaccaagatcttattggttcctagctaaatatgtcttgtccaatcatgcttcgccagtgacatacttctctactatatcatgtcaaaatgaccgtcaacttcttgtctgtcctattttgttaccttttaatctttcaatcgatgctatattacctgacaagaagaggtccctcgatacttaggccagcaatctcacaatctctgctgcgccctaaatattcagaaaggatgttctccgccgttcctcaagcggttaccaaccaccaacccaatgtctcatatcggtctctagcattatccccgagtgaagatagcccagatattcgtcagaaataccgaccatttatccttgatgacgagccaactgaggactgggtcaacaacttagacttggccaccgcagcagacatggcagaacataacctacaagtcacaaacgagaggctgagagttctggtactctatggaagtcttcgtaaacggtcatattctcgactagtggcattcgaagcttcccgtatactcttccggctcggctgtgacgtacgcgtctttgaccccgagggtcttcccatgaagaacgagattgatatcgcccatcccaaagtacaggagctcagagaactcagcgtatggagcgatggacatgtctgggtttctcctgaacagcacggtaatctagtgagttatctctcgccatagtctcaacatttccgcattatttacttacaggttttcctgcaactttagactgcggtgttcaaaaatcagatcgattggatccctttgactactgggagtgtccgtcctacccagggccgaacactggctattgctcaggtgtgcggtggatctcaatcgttcaatgcggtcaactctttgcgtatcctgggtcggtggatgcgcatgtttgccattccgaatcagtcttcgatccctaaggcgtatacacatttcccagatgaaggtcaaccgggggatcagcgactcatgcctagtggcaacagagatcgtctggtggattgcatggaggaatttgtcaaatatactattctgatgcggcctcacatcggtctttttggtgaccgttttagtgaacgggaggaaaggaagggaaaggaagcgaggataaatgtaactacggctatttgaaagaaattgaataatagtgtgtcagggaggcaatttattatggtataattgctcaacatactttgttatcatagctggcaactcgatggctaaggtaaactatgagcacattcgttatttgattggcaaattggattcgaattctagaagatactagagatacctgaccaatatcaagattagacctttattcagatgtcatttgatgagacagtccgagcctagcatcaatcatccagcaaaccattccactccggaatctcctcgatcaatttccacataaaattctccagcttattggcacatttggtgtataccgttgtggtaccattgaactgccgacagttactgaaaatcaatctgcaatcctcgacgagcttttccggggtggaataaaaaccttgctccaatcttccttctatggtcgacagatccatgggtgatacgataacatcgtaataatcagggacttcatctttgtcgactggtttgacaaagggccaggcatgctcgtggttttggatttgattcagaaaacgtcgaagttcgttgaaatgaggtccatggcatggcttccgctctagctcgtccatagctggggtccagccagtctctcggatagcagggatagaaagcggatcgagtggagtgataacgccgttagcccattgctgaggtggtttatggataacatggttcttgctgaaggtacggattttggccagaacagactccttctgcttaagaagcatacggccagcttcgagataccgtatccggggaatcatggagcattgcataagtgtgcctccgtcgtaatccttgatacaccccatccagatagatctatcgagcgtgatatctttagtgaaaccttgctttcgaaaatatccgatagcgtggttgtcagcgtaagttaggaaattcatcactggggaagtagctttgacgtaatctttgaaatgcgccatgagatgcgctccgtatcctttcacctgatggtcagattcgatcgcgaagaaaacaatttcggcaaacttgcgttctcggaattctcggtatgatattccgccaatgacctctaggggcattttgacaagtgcgatagacaaatgagaacgatcgtaaacaagacgagcgatgtattccttaggcatattaggaagttgcttttggaacaggcatttcaaacccgtgaggatgatcgtactctcacgggagccatcattgttgacgactcggaactcgatctcgccatttcgttcttctaaaacagccggcttaaaaaagatatccgttagaacattctatgcagcctaacatttgtagttttagcataccttgtctgggaaaggaacccttccgatcggggctggaggttgaacatccggtgttgtcgaactatcgcgagagtcttcgattctttcagcctcaggggtaagactcggtgcttcagaagatgtccgcttcgccaggagagcttccctgctgtccgctgaagatgacagtgactctgtgtcgatcatctttgttgaataccggcgatcatgcgagatgtaaaagcaaactaatgcaggtgagcgggtgtgaatgagcgctctgaagtcgctacaaatgtcaggttgacaagagtccggacctcttggtaagtggttggcttgataattgttccattgtagcaaccatcgcgcgttcttatggttacgatcttttggcctagttacttttgcaaccacttgggtgccgcagcctaagttcacggattgtgcactgcctgcgaacaaataaatacaacgatatgtatcaataataggtgctaaactccttagaatgtcaaatgctgtatgatactagacccatacaaattgagaaaactcaaaacaggaggtcggggggcgcgggccccnnnnnnnnnnnnnnnnnnnnnnnnnnnnnnnnnnnnnnnnnnnnnnnnnnnnnnnnnnnnnnnnnnnnnnnnnnnnnnnnnnnnnnnnnnnnnnnnnnnnnnnnnnnnnnnnnnnnnnnnnnnnnnnnnnnnnnnnnnnnnnnnnnnnnnnnnnnnnnnnnnnnnnnnnnnnnnnnnnnnnnnnnnnnnnnnnnnnnnnnnnnnnnnnnnnnnnnnnnnnnnnnnnnnnnnnnnnnnnnnnnnnnnnnnnnnnnnnnnnnnnnnnnnnnnnnnnnnnnnnnnnnnnnnnnnnnnnnnnnnnnnnnnnnnnnnnnnnnnnnnnnnnnnggggcccggggcccccgacaaagtatacaaagagccacaattattccttccagtagcattgcgataatatccaaaccaaaatgtccacattcaatggcttagaaataacaacagcaagtcgacccatcccaccctaccaaaaccccatctaacccaaccaggcctcaatagtcgccgcactagcgagcgaaggagccatccacccaatagacacagtaataacacgcatgcaatccccgatgtacagcagcgtctacaagcacctaaacggcacactgagccgcgcactcttcagcgggctataccaaggcttcgggccaaccttcttcgcaggaacactctcatcagctgctttcttcaccgcatacgaagcctcaaagacggcatttagcaatgcacaggccgccggatatatgctcggcgtcccgcggccgctgatccacgttgctagtagtgctgttgccgaactgcttgcatgcgctatccagaacccggctgaggtgttgaagcagaatgctcaggtttttcagcggccagtcaatgcagacaggggcccgtctccgacgatggagatgttgcgaaggtttcggaaatatccggctgggttgtgggccgggtatagtacgttagtggcgagtcaattgccggggatgtgtgttacgttctgtttgtatgagatgttcaaggaggatttgcttgagcggtggaagacggggaaagatgatattagacagcagcttgaagcgactgttttgggtgctggtgctgctggaggttgcgcgtcttggttgtttgttcctatcaatgtggttaagacgaggatgaggcttgcggttggtgatcagatagatagcactcggtcaggtctcaagggaaaccctggcttgccatcccgtatcggggcatttgctattgctcgagatgtgctgcggaaggagggtgtagctgggttatttcgggggtctgctttgacctgcgtggcagcgattgtggggagtggactttatattgggtgttatgaggggacgaagatatacttgtgcaattatgaaggctcatagttggcatggttggagattattccaagtcaaatgtatcttaataaatgtataatagaatagaattactctcctccttccgtgttgtcacctaatagaaatatgtaatgcggtatcagcaaccataagcgtatagtgtcgcgatatataagcatgtaagggcatttcaatctacatgtatcagcactctactggccggtctacatagaacaccaaaggttgaaatgaacaaagccatgctctattcttgattgaacctcgcataggacgaacggtacaacacatacataacagacaaaactcccttcgcctggaaaaagaaaacgaaaagcaacctcgtcacgggcaaaaagcagatacccttcaccacctgttccgcccgaacaccaatccccgatcctaagcatcgtgaagccgtctcagatgaggttagagattaggtgaaatgaaaccgagataaatcaggaaacttaaacggaagaagacacagaagacatagagagtgaggttaagagatagagagatgggtttggggggggagagaacgccagggagtaaatggacgccgtctcactacatcaacgacacgaggcaagaccattgttccaggaacagatactccgctagcaaatcaagaggatacagaggaggataagcgagaggaaacggaagaaggacgttcataagcaggagagagaaaacacaagaaagaagaaaagagatacgtaaagaaacaccataagacggctgactagagagccaccacccaaaaagattccgaaataacaagcacgaaggaaagaaaccggttggaaaaacaccccatctccgaagatttcaaatgctccatatcgttagtgccgttgtggcccaaagtccgcctctaccaccttgcccttcttgccctttaccgtaaactctgcaagaagcgcgacatgatcactcgggaagtggaaattcgggaacccgggcacgcggcgcaggtattccttgtccacttcgccgagcagcgccgagacatgcagagtgttggaagagtaccaaacataatcgagaatggctgtgaagtcggatgtataattggtgaagctcagttctcccatggaggagtaggctgacttcaacttgaagggatgtgtcatacccacgcggctgaggtttccgtaaagtcgcttctccaagtcgggatggtcttcgggaagtcgtccagtggagatcaagttataagccgcagacccaggtgaggagttgaaatcaccgcacatgagaacagggatttgatcgccactggtgtactccatcgatggggcaggttccaccacaggcgcggtctctgagccactttcggcctccgagaagcggaatgcggtcttgtccgtgcaggcgggccatttggcgtaattatccgaaagcttggtgatctcctccatcagaatcgcagtctggatcagcttgacgtccttgaaggcaggatcccaatacagatgagcgttgacactgatgaagcgagcaccagtttgccggttttctaagaagatcacaacggcgatgtggtccttctgccaaagtcggttgtagatatcatcttggcccttggcgtcgggtcgacggacggctgtctggccaaaattgatcaattgcttgtccaagaggatgtacttgcttcccttgaagaatgtagcacatccatcgaccatccgggcatcttcctcttgcatgcccattgcacgaccacgtggccagtatacacctttatagtcattgtaggcaagctgttcccggaagaaattgttgtaacttccctgatcaacctcctgaaggcagacaatatctgagttgtgggatcgtaattcgttgagaataagctcgcggcggtattcccaggacaggacacgtgagggcacatagccgtagtgcgattgggttgcggaagagtcacacagggtgttgtacgacaatacggtgatcttttcggtattgctgttggacgatgttgaagtatcatcaaggatcacccagtcacgatcgggaggaggtaggtggactgtaatgataaagttagcaaaaaattgagcggaggaagcaggtagaacatacctggcatctcttctttcaggtacttgatgagagccttggttccatccttcatgatctgagatttcagaacatcgttcagggggttaccctcgatgcccaaggtttccaaccggtaaaggtaccccatttcgtaagggagagtgcgaatgttattatcgaagagaaggagtttcttgaggtttgaaagcatgccaagttctgctggcagctccgtcaattcattgcccgacaaatccagatggttcaacttccgcagttgtccaatagccgggggcagcaccttcaacttgttagagttgaggtacagcttctcaataaaggcatagttgaacaacgaggtagtcaaagcgcgcaatccttgaccaccgaaatcaagcgcattccaaccctgtcggctagctggcttccccgcagatgcaccatttcgcccatctgcgccgttttctgtgtcggtgttgctggacatgagctggattcctttcgtttgttgcgcaatgacgcgggcatggtagtggggagaagtagcttgtctcgattctgccgcaagctggagctgctgctgccaatgctcgttcattgattcatcaaggtcatcgtccgcggtcggtactccgttctgcaaatgagtcgaggtgaagtgagaagttgtcgtcgtggccagtgtgccgccggggaaattgtgttgatgggtgaggttgtgggtcgcttgtgagtggtgggcatgatggtgcggttgctgtgtatgatgagagtggtgggtttgcgactggaatttcgggatcggcatgccaaaccgctggtgggcttgaccgccattcatcataacatgctggccttggtgggtttggccgtacatgttgttaaaagggctgagagcagcagcctggttgagggcaggggatcgagagggggagggggtgtcgttgttgaatttcagtcgacccgtcggagaattggtcccgtttcgaacaatgtgtcgctggtgagggttctgctgtgcttgtgcttggaagtagaactgcccggccccaggctgctggaacctgtaggtaccatctgccatttaacgtggcagacgagaccgtgatttgtttcccggatggaaaacctgttggttggtgggcggcgctaagttgagttgggtcgagaagaggagaggagaggatcggaggcggtctcttctcttcttccacatagaggcctaaggcaaagaaacacctgtatcaaaccacaattggaggtcgccggaggctttggcactgagagtatctttatgtgtgcaatggagcggtacctaagggcgtagattgggcggaagggtcaaaagaaggcgtgatcggaaaggcaaaaagagatcgagtttggtgatgagttgaataaagaccagtggggcacgattaacgtagcaaagaggagcaaaccagacgattgtctccaggtcgatgaggacgtcctgagatgacactggtggtttgcaacgaggcgggagtcacgagatcacgtgaatcgccgcaagggccaaagtcttcccagctttgatgaggttgaattgccaagacaaaccggttccctcaacggttggaagtatctttgatgagagattggatgttgatcacatattcttcatctatcctgcactttcgtattactttgtgatcgatgggactgtttatataaaagcagccacgtggtcgccttgcctgccaaaactacgggcatacgcagctgtctctggcgacctaagtcgaagctgcatggattttgattgtgcctagacatcttgtttgaagctagccaacactacagggtgtacaatgaaaggcatcgggtctaggatggagatatataacaagtggccagacctggaccagaaggttgaaagaatgagcaacagcctgatctattctaagcctcgctaataatatcctaaacttctcaaatggagtctgtctttggttttgttctataggtcataggatcctgtgtcaaagtacaacaaggtcagtgaacctcttggcgtgaactgcttgggcgagacactatgttgcaataataatgaatggactgattattcaatccacattccccaaattccacaatcgtatgattaaggagtatacaacataggccgcttctattactatgctgtatattgtatggtgtttactccatactagcagtgataattggctaatgccttggcacaccaccctaacaacataagatatatggggtacggagttgaaggatcactatcaaacgatgtctaaatagagggttttctataaataattccaatcctcaaataatactccttctcaccttgagagtcctacgagtagtgaatatagagatatgtgtcattgagatgatctatgtacggctgctgcaaggtatcacagacctagtataactcgcatattcacaaaaaaggggtatctgcagcttaatgcaaccacatgctctagaaattaccccgtacctccatcttcttaccgatcatattcgcctcgccaactccgtctatattccgtatatttccgggtcttcaaaaatgaaactagtcctaaaccaaagtacaaaagtacgtggcagacgctattgtgtcgatcgaattctcgtatcattctgcaggtacgttaatactaccctgcggaaggggcacggatcacactgcagaccaagacgatcgcgtggaatagtccatggacaagtgcctgggacttagcgtagggcacggggtaagccggtagattccagcgttgtatcagataaagcgacagctcagtctcagagtgtcggggcccagactgcggatccaataaatcacttggtgatggatatggcgggtagggatctccgtgtgtatccagttttaccgtttgaattggatacggagtacggagtacggagtacatacgagtctgctagtactctcctggctacactttgctttttcttttggatgtatcttatcaatcatagaaagcattggcctatatttaaggacgttatactccggacctcgtatatggttctagcccctgaagactatatagatcaaaaagcaaaagcgacctaatatgcaatagttatacaacatccatcacttctatactccgtagtctcgacccgttaggccagcattccctttttggcgagggaaccatgggttatggcttcaatgagagtcatgatgtcaagaccggtataaaaatagggagacactcattcgcactcttcacgttcactcaatgtcaaggtaaaacaccccaatactgatattttactaccggagtaaagtactgttactgttaccgtgaagacacgaacagactaaactagactcgagtggatatcaacttccaggggtcaggtctgcttttttcttccctccttcccccccatttcttcttggacttctcgaatactcttcgcttcgaaggatctgcgttgtacgcaaatccaaaggattatctgcaggctcagtccttttgttctgacgttgaacaagaattttcagctttgcgaccggctgcgctaagaataatttccgaagccgctttggtcccctgtcacttttcctgttcgactctattttttcgatttttcgttttattttattttatttccctcggaactgtcttccactcgaaaaaaaagcattaaaggaaaagaaaagtatgcctcgttcatgaaatcagtcttgcgccgagaatgcgaccgaacccacaacccatcttcagagtcataggggacaccaatcgatacacttgaagtgatatggacgtaatggcgttggggttctcagccgcagccgcagccgcctccggttccgacctacactccaacatgagctcgacactggccgctacgtcctcctcgtccttgagttcactcacggactactcaacataccctctgatgcgctatggtggccgcacctacttgcgcgacccggagaacgtctaccctctgccttgcgacctacccgagatccaccgccaaagcttgcgcacgctgatgctgctgcgcgtcctcggcggcccattttgcaacccccacctagccagtcggccgcccaaacgcgtcctggagatcgcatgcgggtctgggctgtggtctggtctgtgccacgactacttcgcccgcaatggccatcccgatgtggcttttgccggaatagatattatctccattgcgccggatatgcgcaagcagggaatgaattggcaattcaaacggcatgatctgcgtcggccccgcttgccatttccggacgactattttgactttgtattcattaaagatgccggcatgtgtccgtacagtcccgcgcaatcagcatcgggcttgagcgagcccctgcgcgtgttaaagtccgggggcatcctggaggtgtgggattcggattggagcttccgctcgctcctgcccaatccatccccggcgcggaaaaccacatcgaaggaacaggagatcgccgacgaaacagctacctatacattctcctcggccacgccgtttacacgagcgcagaacaagttcgtcgttgattataactcctgggtggaaaagtcgttcgaccgtctcaagttgacggcgctcccgtgcgcaaccatcggtctatccttcaactccgaagtggacttgctggaaaatatagacagtcgccgcgtcgcaatcccactaggtgacttgcgctgggagcgcgacggccaaggcaaggattccaagagccgtccacgcaaggccctgactccagagcagatgtccatccggcgcacggctcttctcaccacaatccagatgattgaagggctggagccgatattgatggagtctagcggaaagggccgggacgaatgggaccgatggtgggctgcaatgacagccgacctcttgcagaaaggcggactcgccagcggcgagtgcctcgaagtgagcgcctggtggggtcaaaagaaatgaaccccttgagtcaatttggagttccggtgggcaaaaagtcaagtagtgaccgttctgcactttttattggtgataccccaattttatttctatctttctaggtttctaacatgcacatgatctggacatttttagagaggtgagagtcatggaattatcaggcctcacttccatatcgctttttcagcgttcggtaccgcttcaaatagtacctggggttttgtttatcttgttagttgccatcaacgcaaattcttgtgatgggggtcaaaatagttcttgcatgatgccatgataatgaggagtgaacctatgcacagtgtatctagccagacactacccattatgggtgcaatgtatagaagaatgacatgtacgaatgattccacttccagttgtaatgaagcaatataggcagtgaacgaggaagatcggacgacaatgagatatatagggtagggaaaaagggagggttatagggaacagtcttacagtgcttccacttctacattgaacaattagcaaatatcctgcaaccgagtaaaggatatgaatcccagggacatagaaagcacccacctttcttcacaaactccgccctcgctattccctttcggatctgctcatcgtcggtaatctgagtctgacttgcaaatgcacggtgtagacgatcccggaaatactgatagcccagagggtattcccgtcccaagaacagaagctctgtatctcgggtgattagcatgtagcatgtaacagatgacgggcttgcgactgaagggaaaaggaatccaagttatacggcttcatacctttgtagacgttaatgacctgtcgacgtagctcaagatttaccattatcgttccatccaagaactaggatagttgaaggatcaacttgggtggtggggatgcggtgcattaaaggtaggcggctgagaagcttccaaacctcgggtgtatcggtgacgggcctggcggcctccatgacatatactaccatattccatgttcttggggcaatatgtattttatttcttgggtttacgtttacgtacgaaactatataaactctgtaattataccatacatacttatagattaatatcaatacagcttcggttcaaacgccctactatattcacgcggggttctagccgacctcggccccaagcttctgtttatcggttatcggcggacagcggtctcgccgaatccaacaccgcaactgtctctctcaacaaccacgcgcaacatgctccctcgatcagccttccgagcgcagctatctgtctcaatttctctgtgctcgaatggcgggcgtcgtcttttctctgcgactgcctcggcacacagtcaaaacctccccgactcggccccgatcaatccacgatggctcacaatgaccaagcgaaggatcgggaagtgcctgatgtttgggatgaagccagctcaggttgacgaggggggcaagattttacagcaattggctaaggaatggcgggaattgatcgctgggagtgagggattcctcacggataagaagcgacgtagtttgtttcgccatagtgttgtctggggagaacaggtatgagttgggatatattgctatatatacgatggggatgagagtcattaatgctaagtctgactgttgtggattaggatattatggtgagagcattcgtgcccctagtgcgcttacagcatgcgctatcttggatttctggactaaagctaactggatgatagggtatgctccgcctttttttttaaaaaaaaaatatttactagtactccaattcatggattataccgtactaattagtccaaggtcacgtcaacaacgttacctatgttcgatacgcggagaccgcgcgagtgaactggacgcgcaatatgggtaattatatcgatccggcaaacaagaaagcatggataaacatgctttgtaatacgggaatcgggctcattctgaagagtatcaagatggattacaaatttgtactgtatccctgagacccaaaccccacactactggaaaacaactaagtagacctatttacttactatcacgcagcccatggaatccccagacaaaatcaccgtttaccaaaagctgctcccagacccatctggacatcttgcatcccaatcggccttccgattcgaggtcatgatcatgtctgaagcccaccaacgccccgctgctcgttgcttcgaggataccgtggtctatgactacggtaagaatcgcaagaccgagaatatcccgccgtttatgatgaagcagtttgagattatgtgggagcaacaggagcaggagaagaagcactggagacggaagatagctgagatcgacaatcgggttcggaatcttgagcttgagagctgggatcgggttgatgccgtggaggataacgggtctgcgtcgcagtgatcaaagtgggggaaacgttgaagagcggattatatgggactccttgattgacacgttgtaaatacgcattcctcaagcatacctgactactgatgaaatctcggacgagggagatatggtcataatattaatggtagcagcggcgatgaaccgacatctcatttaagaaatgatttgggcaaaattggcttagaacttgatccaggtgtaattatacaggatgagaacccacgggtttgaatgtcacatcatgtacatacatgcacatctaacccgtgatcaaaaacagccctaattcatgattgaactgctccccagggccacaacactgaatctacccgttattttattcgcccgcagacatcagctgggtgttcgccaaagaaccattaccatacgaatcagaaacagagatccacctttaactccactagtcaaacaactcaaagtttcaacctctttgcaatctcaatcccctcggcaatggatcccactcgtgcatcaatcgcatacccttcactctccaacttttgcaactcagccgaaagctccgacaccggaagcgtgaaacattcaatgaactcattatcctcgagatcaggctttggattctgattttccggaagagacatgtcaacctgaacgtaaaccatgttgaaattggcattgcagaagccgggatctggacaagtatcttaagtcagctaatatccagtaagacgaacagcgggcttaccaaccgttatacataatgccagtggttttatcagaaacgccgatataccctgtctcttctttcagctctcgaactgcagcttgctcgattgtctctccggcatcgatcaatcccgcagggagttctataacgacctggtcgattggaggccggtattgcttctccagcaggatctcagcgccgttcatattattcagaaaagcgacgatgttgactccatcgacaggggagtctgtgggccttgtctacgatttgattaggtctttacagttgcatttacatataggttagaaaatcgtacctggcgttcggcagactcccagtctctcttgactccattgggatcgatgtagttcgttttgactagtcttttccatttggcttcttgggaggtctaaggccgtaagtagctgagagtataatagtcgggttaggagcacataccaagggctctcgtgagagaaatgtggacttaagttgcgtcatttatgtaattgcccctcggcttttcggaatgggaattgcactgcgagtaactgtgacctaaatactgggttgtaagaatgtcccaattgattgcaatcgtctaaagcgggcagtgcccgcgggcggggataacatgatgactaatgcggcgctggacccccggggccggggccgggcctgcccagattgacagccttaggaatgtcaacgcgtgtttttttttaaacgagctaccgtagcatatcatttatactcattccgaatgggattgtcaatcatctttgcctccagaaatctccttggtaacattgtgttcttagggatattgcctatgagagcaccgctgttctacacgcatgacagggtccgcatgagttcatcaattataaacaacgtcaatccttgtgtcgctgtctgtatttattataccgatccccggcgtcaccgttgctttggaatgtgaaaggattcaccctggacctactacagcgccgatgtttaccccattagttagcaaagattatcttgggaggatgaatacgacagttgactatcgtgctcggaagatcagacatagacgggtgtttatactgagtctagttgtattggggactttagtgatggtttaggtactactacatgcagctgtatatcggtacatatgtagttccaagattttaggtgtagtagtaatttgattttggccaagattggccaaagtcttggttgaagttaaagttaacattatgcgggggatggaatctgcctagatgagcttcgggttcatttctcatgtcaaagtatacattttcatttattgtgaagaatcttatctatcccttgttcattccttgagcatttcatatgtcgctttctttctctgacatttctacagtcattgctggatgagaaagagatatctaatgcatatattccgttttcgacatttcaagagtacacataggggccatattttccgatccatatctgttttgagatatactatactagaggcagtattcatgtgtatacctgtggagtataaatttgctgttaggatcctagtgtttcaggatacatactaactgcatgcggttaaagtaaactttaagcaaatttgcctcaatgaactacaaaagattagattgttcaattgattagactatgaatgaattatagaggctaaaaacctccacaagtttagccacttccgtagcaattactggactcaaagaccccgccacaggaggggagagccgggattactaggaaagcgaaaggatcgaccttgaaaacccgaagtttatcggacccaagcaaaacccggttctaaaataggcaaggcggacgcgctagtggaagtgtctgcaattgtctagaattgcctatgcagcttattgttctgaactggggctgaaaatctggaagtataaaatgcgaaagaagtgatcgagatggtgcaccctatatactccaggtgagacaatggtagggctcatcgtataaaaataacttaagccatcaccaagcccagccgtcgggccgatctttactaagcttgtggctgatctacgaaacccttcagggttgccaagcccgggtatcgtataagaggggaaggatcggaattggcaaagactgtacggcttctgtcttttactttaggatatcttctttacagtgtatatagatatctagtctgcacgaggcatcttgatatatccaaaaacgtcaccatttggagatctaccgacccatgtactcgtatgatacggagccttcaggaagatgcacgagatagccgagcatgtgatgatccaagaaagaatgtggacgaccctgttgatacacacctttgatacacacgagcttcagttccccgtacttaatcccatgatgctctccaggttcgggattgcgtgttcatacatgcaggcgcatccgcaagcgagtccccatggatccgtaacacatatcataagtccggcacaagactgaccccgcagcagacgggtcgagaaacggtcgatcgacaatccaatcagtcaggttgacagcaaatagggaccggttatctgaacaggctttcaagttgatctgtataccgtaggtactccgtcactagcttatcagcactagtcaatccgttttgaagaaagtctatatagcgccgaggcaacgaaaacatcagtatcgtaaactcggctggataaagcgaaaacacgcttaggattggccaatgtgcaggtatccgcgctgcaggacccggcaaccacaagccgtatagctcctatatagggggcgtgacctgtcaataagccccagagtatcgtaagatacagaggccaaagaaagaaagcttggcagtggattggccgtattgactgggattttccatgcagcaactccagatcgacaaagaagccacgggaatatattaccaggagctctttaattgaatttgcaatccggcgtcgcgcaagtagacagtaccgacgtgacatagtggcgaatggtattgaggccaggtaccgcctacccgaacggcaccagtgatcgacactgaatgacagtaccaataccaaattctgtttctttcgacttcatacaattccacctgggcactttttccccttcacgcttccacgtagagcgtcgtctcttgccattctcgctcatttcttcttttccttatacatctacttaccatttctttctcatcttcattaccatacgagccactctgcaccatttccttccccccaccatattcaatttcagtccgttttcgcctttttcctggtcccagtccttggcttcatcccgccaagctgactcggacctgggtttcgggctccctcgtccatgacacgctccgctgcatctaggaagaaccagagcaatcggcaggagaatggccttgtcggtcccggcaagaaattaactaagcaaaagtcaagcggccatctgaacggcaactcgggcaacggctctgctaccggtccgggcgcgtccgctcacttcgatctatcctccgtacggtctgctagcgatacggctttgatatctccgacggttgccggcaaaggaggagatagcacgaaggcagatggcaatgtgcgtgggatgttgaatggacatagcaagggtggagacatgacatctgcgcaagaaaacggcgatgtcgcccagaatggtggcatagcaggtcatgtctctcgcaatggaacctcgaaacgatccggatccaatgcttcgattaatccgctccagctcgcatcgactatcctcaaatcgtgcccgatgtacgacactatcgccatcttgatttttttgctccagcttccaccgatggtcttgaccctcgttcagttcttattcgcctccttgactttcatgcctcccagtggcgccgcggccggttctttgtcgtcgaacttcgatatttttcagggtccggctgggacgccatctctggggacaatgattgcgatggatgggttctgcatacttctctggggccttttcatgtggaactgggcgcagaactttgccatcgatctcgctcatgtccaagttgctatcaccttgggtggcgggggttccgggaagaacggcggggtcaatgctctctgtgtcggaattgttctgcttcttcatcttgttcgcagtaaaggcatccaggactttgtcttgggtcatcttgtctctgctaaactgctcagtcccgatcttctctcccaatattcgcatctgctacccgctgagttccgacactccgaagcacaaacgtctccgagctggctccgcagccttcttgcggtgcatatcctcgcacaagctggaaccgccatggcgcgacgttcgatggccaagaatcggtcaccgacaccgttacggaccggcaagcggggagatacggaggcttctgcgggatcacaaggacaggcagattctgctctggaatctgctgccagtgtttcgtcttgtttcgtgggacctgatggtcagttgaaagacggaaaggatcgtttcacgtcagctaagaaacgcagacggcaagccaatcaggttcggagccgacagccgttctgggctgcgcttgccagtacaaaagtcacggtgatgagggaatatgaacattcgcgggctatctccaagacagcccgcaatctcacaatgacggaggaagatctccagggggtgtctctcgacgacgggttaatatggattacggatgtggatagctcttcgattaaattcgccgcgggtgagtttaccgatgaccccgcggtgtcaggttcatttgaagccggtcgtttggaaggagacatggaaccattctacgtctgcgtcaacggtgcgctttgggctaccgcttcgatatgcagagtttcagacgccaagggaccgagcgttgtccaatggcggggcgagattgctggacttgctcccaattgcgcatacacatgtgcatttgtacgaagcgataccgacgaggaaatctgtgtcatgagtgtcaagacgccttcaacgactgacacagagcaaggtaagttcaggctaaaagacaacgtctcattttcaataagctcattgcttgaaatagtcatttccgcggtatcgacacccccacagccgacctaccgtccatcgtcccccacaacgacgctcaagaactctatcagcaatgcggaatcaaagttgaacgaaaagcgcaatcgtctgaaaaagacgaagaacgaccataaagctgttatctcgaaaatccggaaagagctcgataacttcaatgctcgcctccaaagcggaaatgacgagaatcgccaaaagcagcgttcgcttcaacttgaacgaaacatccggcagaccgaagaggctactgcggtactagaggtacaactcgacaccatggaaagcgttcctgaggaggagatggaagagtgggcggcgcacaaagcggacttcgaacgcgagctggaacgtttcaattcgaccaaggaagaggttgctgctgctcgaacggctgcagctcagcaggtggcggcactagagttggaattgacgcaggctgttcagaagcgagagcgtctccagggtcgccgcacccgggtgaacgagcagtatgagcgtatcatttcagccaacgcacaagggttgaatgagagagaacgtcgggccgctgaacaatttgccagggaacaggaccagtcaaagatggagagcaatttccacgagcaattcgggagcatcagccaatccgtgcaggatttccagctgcgcacgagtcaactctggcagcaggcatctgcaattgagcagtccatccagcaacaacaacagcaaatgctcctcgagtctggtcctctcacacccgaaggcaacttgccgggcaccaatcctctgcctgagaccagtggtccgtcgttcaacgcatctacgaccactgcacctagcgctcgatctctgatggggggtcttagctttcctcatgcgagatctagtccactacagatttcgtcttctccagtccacgagatgccgtcaaatccaactagcccatcgcaagaccttcccttcctcccacagtttccaaactctcctgtcggcaacgtgggctcatacttcgggtcagaaattaaccaccgagaccgttcgttctccaaccgctccactcgcagcagccaatatggctctgaattcttggacacgaaccacttgccacctctccagcttgacctagcagaattgcttggtgagaccaagactcggcctgggtctgatggtttcctgcatcaaggtggccgtacggtcctgagccctttccagcgagcagtaagccgaggtagtggcagtggcagtggtagtggcggtagtggcagtgggaccggcagtccgcactcggcacgagactagttctctcggcggttgctgttgtggtctcatgcctagccacgctgtcaacccgccatgcttgtcttctgagaagtggcctcaagttttgtgcgtccgtgcttttggttccgtccggttggattcccgccttccgttagtcaatctttctcggcctgcgctgtgatggctctggtttattgggccgttgtagtgtggcacgcatctcgcgatgagatgacaactatatggattcgatcgaagtgagatacatgacagctctgttcctaacgccgaaaaacaaaagtgttctatactcggttcttgtatactctctctcacaaaagcgtagacgcatcaatatcatgaaagcatttctcatcttcatctctccatgtctactgtaggatcatagtggataggtcgtcgatttggctttgatgccatgtctaatcaaaagtatatatccagcccaaacgccgttttcccaagtatatacaatggtttgccaatagcataagcgataccgtattcttcatctatatgaaaccagacatggctcaaagttcaccccccatcttccaaaacttggtatttgcatacgttaaacaaagccgctcaggtaaatcattcaaggccttatcgtcttgtcccagtgccaaaacagacccagagccctcaaccgcccgaacaacagtacccagcacgatggagtgatcattcacatcaatcttctgcggatgtagggtacattcaaaaacaaaaggaaactcgaccgcgtcatccacagcgattgcttccgccctccgcttaagaataggaagcgatcttgacggatatccctgctcgtccttagtaggcaaagccgcgaactcaaactccccatgtcctctcagcatagaagcgagtgcgatattccccttagagaaatccctggccagagtagcagtcgcgggactcggtgcaagtaaatgaaccaggaaccggcgcgaggcaagcaacgcattcaatgtctccgatgggcggcgcacgttgaaagagatcacagggtccggggtgagagtgacggtgctgaaggaagagacggtcataccgcggaaggaggttatattttctgaaccggagggatcggttgctgttatgattgcgacggggtatgggactcgccgcatgaggaggcggacttggtcggatatagatgtcgagggtgttggcggttgtggtgtgttgtctgcgtgggatggggcattgggcttccctgttcgaccattttcttttgaaggcgctgtggaattgctggtatatcgtcgttgatcggatcgtgatcggtgtttggtgtatggtacaggcggagaggttcggagggagagagatgttcccaggaacaagggtgtatagttgttaatgcatgatagttctggcattttctattagtacaggacagaagcattggacatacatcgtgacaacctacctccgagtgctgtccgagcagtcccatgcgcgggaaagacgagcttcatcccgtcggcctggaattgatggagctttgagaggcgctcaggggatcacgcagggcacaaagtcacagataataagactctgccaattcatgtctaaattgacagcaaaaaaagagagactcaaagagacatagggcaatatgaagtcatgcaaacatctaagttatgaaattcccgaaaagaacaggcccgcttacgtaacccgcgataatttctttgctatggcatcaacttcgcaacctccgcaacctccccgatagcattgcggccccgtcaacctccgccgacctcgacaatactccttgttatttgcatcggcatttccgaaacaacttatacaacatgtcaatgcacacctctctccgccgcacagcggtcacaatcaccaactcaacaaccaccatcctccctacaagactacccacgagcggcacaaccttcatctgctcgcaatgccgacacgccactctcctccgccgccccaagcgcccctacacctttacacagctcatcacgctttcggacggcagcaccttcacgcaccgcacgacctcgccggccccgatctaccgctccacgcgcgacacacgcaactccatcctctggaacccgtccagcagcaagctgatgaacgtcgaggaagacgaggctggtcgtctggcggctttccgtgcccgattcggccgcagctatgatgccagcgcggcgcctgctgcggcagcggaagaggaggtggctaaggactctcttgcggctaaggaccctgctcttgcgaagcgggccgaggccgaggcgaaggctgctgctaaggcggagcaggaggaggaggataacttgcttgatttgattagtgctttcgggcagaatgaggcgccgcctccgcctgagaagaaggttcctaagttcactaagaaatagtgggctttggatgtcccgggttgaatcaggttgttctgttttggactgcttggatgggagttgggatcttcttttgcttttttatgttttcttttcttttcctgtgtttttgatcttgtacaatatacatatgtctggtatgagcctgctgtattataccaagaattcatcttttctctcatccatgctatatttttgtcaagtctatactattaccatgggtcttgggagcacctgcccaggtggtccttatatactgtgactattcatacacagccgattatctctaacacagactaacacctgagtcttgttaacaaatgatacaatataaagtaaacacgcattagcattcatcaccccacctcagcagtatctcgcaaggtactcagctcgtgggcatgtggctgcttgatggagtggtctatggtaggtatcggtctagggccagaggaagatgtatgaattaggacagtataactgactagggtagataatgattttatttgccacaatacgcgaacagtggtattcgaagtgcagtggaaatagaagaaaaacacaaagatccccagcttgctgaggaccatcatcagttgcagcatggcataaacaaacatcgcgaaagggttgtcccataataaatacaaaagacgagatagaacggtgctaattccggggttgggaaacagcacccgagactgaggcatatcaagcgtcatcctcagcggccagtagccccgattcatctgtgggctctgccggagcgggtgcatcgctcacctcggggggtacataatacggaagtccttcctcgccagcatctagacgcagaaggaatgtctcccagagttcgatcaactgtatttagggttagctggatgaaaaaaaccaccaagacttggcgagaacttacctctttctgagcctcgactgcactttcaaggaatgtttccacgccagacttgaagtcctccactttctccttctcaaaccgttgtagttcgttccgcataagacgacccatatcttcgaagagcagccgcgtttggtgcactttgcgctctgcatctgcaacgtcggcgttgacttggtttaagcggtcttgctgagtctttccctggcggagtagcttgtcttggttattcttgcgcttctgtaggtcggactctgctgcgtgccaggtgtggaaagccttttgccgctgcgtgaaagccaacttgacacttccaattaaacggatatattcatcgatcgtgattccaagcgtcagaacatcctgctgcgcctgtcggtcataaagttcccgaatgcgcaactgaagttcggacaggccttccaatgggtaggaaagggcgggagacagctcgacggcggataaggcatgcaacgagctcgaaaagtcgcttgcggcctcggatagtccctttcgttgtataaccacagtatccattgatttcaatagagccttcagctggttctccaatgcatccaggtaaacttttcggtcgtggaaccactatttataggtgagcaggcgagaccgatgtatcagaaacgattcacttacatcgtcatgttccacgaatttagttcctccaccaacagaaataccaaaggagctcagcattcccttgcttgggccaatatcaggctctctgttttccttattcttaacatcaacggtgaaagcttcactttctaggaaaattttcaaatcgccgtcatgttgaagaataggatggccggcaatcttgttgagcattcgttccaaggcagctctcctcgactctacaaagttggtatcaaaccggccaactgcttgcttctcgggcggaggcgcaacgaccactcccgggttattgctgtgcagggagttgtagagccagaggaaatcacggtatcgacggctaacggtgaactcgggttggcgataggccttagaagttgtctagccataaagtactgtcagcctttccttttccactgtaaattttagtgtgtctaattacctttgtcgaaacttgatacacaatatgactgcttgtcagatctcccactttgtgcggatctccgacatagatatggaaagtcggcttcgcagcctgctccacgctcatgctaggctgcgtctgtcttttcggtccatccgcttgcaccggtggttgcacgggagggggtcctcggaagaccgcgctctcctcttccaaattggccgagtctgctgcctccactccagatgcctgggagggagatgaaagtggtcgtgcaccccgtccggcgaaaggctctttctggggcggtgctggtgcctcatctgtgggtgttggggtgtcctcgacgggcgcttctcccaatggaccgagagggtcgacggaatcatcgatggattctagtttagtggcttgtgcgttgatcttgcgcgtccctcgggggcctcgtcttcctggtgtttggacagcgggcgagctgtctgacgcgggggttgcagctgctgtgtggtagagtgcgcttagtgaaagttcgtggaaagagcggacaagccagataaaacataccaccttcttcggcgccgggcttggggccgtcgctgtgcttgaaccgcgaaggctcatctgcatcataaatcagagtgcgattcaaagagctgtggtatgatgattgcctaccgccccacggggaatctccagaatcgagatccattgctaccggtatgagatcaaagcgaagagaatgggacaacggcgagaagacgaatcaacaaattaagattaatgtcagttcaatcggagcttagagggtgcatggagttggagagggagctggttggagtggaggccgatccgcatccttagtcactcacgggatccgggcaaccttggaagacctggagtccaccccatgtggtgtttcgtcttcaactctttgccattggcactactctttgatctgggggctatttatttatgctcatgacgaatacaacccactggatgccagtacccgatactctctacacattttaatgtcccatgtctcaacacgtcacatcatttcaattggagcttcttaatgtcgggatgatctatccacgattcccccgctcaaatcaccatcggcatttaaaaggtcattagcaaccgcgcaatatctatttgacccacgggaggcccagcttgtgcatttccacagccagctggaagatgtaatccagactctcacactgagtcttcgccttggcagtgttatcaccccagacgtaactgcaggaggaaccaggataagtatacatcagtatcacatggagggaggttgctatcactcacattccgtgcctccggacaagaaccgcgtatgtgtccgggtacttgttcatggctgcctccaaaccactggtgaggtcctcttcgaaggcggtgttttcaataatgggaatcttcaaagtatcgaagaacccgagcatgccctttcctttaccgcggggaatacccttgatctgctcaatgttgctgatctcgaaacaagcatccgggcccttctcccgctccaccaacagagtgatcagaaccgcccattgcgaatgagtgtggatgcagcacccagcaccatgctcaaaggcagtcaggaatagtggggtacaggcggagggattaagcttgaggggtttgcggatgtagttgcggtccgaggcagggtacttgggggtcggccattggagcacgaagatgttgtgaggttgtatcaattccttctgaactccggacggagcgatgaagatgtgttcgccttggcggatcgatgtctacttttccatcagcggggcaccgttgaaattttttttgccttgcaagtataagcttacaccacctccggtgccggtaacccatccccagttgtagaatttgcgacagagctcggggataaggttggcggggtgttcggggtcatcagactggaccaagtggtcattgttcggcgcaacggtttgctctgaggtgcacatgatgggctgcgacatattagcattggttcaggtagatattcataaaggtggaagaggacctaagtttgcaagtaaccaaatttgttattgttctggtgagccacgaggtttccaaggtttgcgacgagagtgctgagtaaccaatacgtttggcctcgggagcgggggactacatattcagcacgccattttaaggaacagctcttctagaattgtacttgcagcttaatgttgatatcaaaacacttgcgatatttaaatgtaggaagcttaattgcatctccaatcaggtccttctcaattgctatcagtcggtgtttggtgttctctactaaaatgacaagtgtagtttaactattcatagtttggcgctagtcaaaatttgctaaacatgcttagtaatgtcgctgcacaattgcacataactaactaactagcaagacacgccaggtctgctgtcaccagaagacgtgctctaattcattttagcgtcggaatagacagactagcgtctagagtgctctgcttcctgttagggccacctttaggaattctttaagaatcctatagattccgcgacctatgaacggcttacaccatcaaggatcaataactgcgggtatttatacacctcctcacttattagcgttgggagggaaaaataggattgaatcaaataaaaatccaataaaaatcaataaatacatgactcgctattagcttgatgaacagcacataaaaccaataataacacatatactctccgagcaactatttgtgtccaatcactgtagaacaagatcgaaacccgtgtgtacacgccctagtcccgattggggagcttagggaagaggccacctggaccttccccccagtgttgccctttctataaaaccacatctcctcttttcttcacttggtgctgtgtgctccactttcattccttctacttgttgttcacaatatgcgctttaacactgcgttgacatctgctctggtctcctccgccagcctcatgggctacgcccatgcnnnnnnnnnnnnnnnnnnnnnnnnnnnnnnnnnnnnnnnnnnnnnnnnnnnnnnnnnnnnnnnnnnnnnnnnnnnnnnnnnnnnnnnnnnnnnnnnnnnnnnnnnnnnnnnnnnnnnnnnnnnnnnnnnnnnnnnnnnnnnnnnnnnnnnnnnnnnnnnnnnnnnnnnnnnnnnnnnnnnnnnnnnnnnnnnnnnnnnnnnnnnnnnnnnnnnnnnnnnnnnnnnnnnnnnnnnnnnnnnnnnnnnnnnnnnnnnnnnnnnnnnnnnnnnnnnnnnnnnnnnnnnnnnnnnnnnnnnnnnnnnnnnnnnnnnnnnnnnnnnnnnnnnnnnnnnnnnnnnnnnnnnnnnnnnccagggggaggaggagactgcggataccaccgtcattgaaaagcctaccttcactgtatgtatctgaaacgctccctcttcgctcactttgctaactcccgcaagcctactagccttaaagctcctttcctggagcaattcacagacgactgggagtctcggtggaagccttctcacgcaaagaaggatgacaagtctgaggatgagtgggcttacgttggtgaatgggcagttgaggagccctccgtcttcaagggtatcgagggagacaagggtctggtcgtgaagaacgctgctgcccaccatgccatctccgccaagttcccgaagaagattgacaacaagggcaagaccctggtggttcagtacgaggtcaagccgcaaagtgagttatgcctttctacatttgttcgagatcttatatgctgactggaattgtcctgtgttagactccctggtttgcggcggtgcctaccttaagcttctccaagagaacaagaagctccaccaggaggagttctccaacgccactccctatgtcatcatgttcggacctgacaagtgcggtgccactaataaggttcacttcatcttccgccacaagaaccccaagaccggcgagtacgaagagaagcacctcaagactcctcccgtggcccgcaccaacaaggtcacctccctctacaccctgatcgtcaaccccgatcagacctttgagatcctgatcaatggcgactctgccaagaagggtagcctcctcgaggacttcaaccctcccgtcaaccctgagaaggagattgatgatcccaaggactctaagcccgccgactgggtcgatgagattaagatcgccgaccccgaagccaccaagcccgccgactgggatgaagatgctcctttcgagatcctcgatgaggaggccacccagcccgccgactggctggaggatgagcccgagagtatccccgaccccgaggctgagaagcccgaggattgggatgacgaggaggatggagactggctcgctcccactgtccctaaccccaagtgtgccgaagtctctggctgtggcccttggacccgccctctgatcaagaaccccgagtacaagggcaagtgggaggcccctctcatcgacaaccctgcctacaagggtgtctgggccccccgtaagatcaagaaccccgcctactttgaggataagactccatccaaccttgagcccatgggcgctattggcttcgaaatctggaccatgcagaatgatattctgttcgacaacctctacattggtcactccattgaggatgctgagaagctccgccaggagaccttcgatgtcaagttccccatcgaggaggctgaggaggaggcttctaagcccaagcccgaggtcaagcaagaggataccactgtcaccttccaggaggatcctgttgcctttgtccgccagaaggtcaaccacttcgttgatctggccaaggaggaccccatcaacgctgtcaagaccctccctgaggtggctggtggcctgggtgcgctcctcttgactatgatcctcatcattgtgggtgccattggtgctagcagccctgccgccccgaccgagaagaagggcaatcagcccgccggtgctcccaaggagaagaaggaagaggctgtcacctcctccgctgagactagcaagggcggtgccaccaagcgcaccacccgatcctcggccgagtaagtgcgatgattgaaaacaattatacgcagaaaagaattttacccacccagcgaagagatttgcatttagttaccgcagtgatccctttcttgttgtgtcttggccgatgtttttggggtgaaggtccatgaaacattgaatggaggcccgatttgtatactcctgattatctctattatttctactcggtattcactttatttctttcttggaaccgccttgccttttcacagtgtcatgactatgacttagccctctccgatataggagacgtaaagtaaagcttgaaatgggaaatgccttcctaaatcgctatgatcccttgcctacaacgtctagtacgcacccgaaaaagaatagatgcaatcgataactgccccccagttagtgtcggcgatataagagccaatttgcaactcctcattggctgaaaccgccgaaaagctaccttatctgggggttcacattacaacgtggggaatacccgtggaccgcccttgtgactaaggcggtttccctcgggcctgggggtcggggtagccatagatatatcattcccgaggtcctggcacccccagatcgtcttcatatttctctttctacttaatctgtgacttgtccttttctctaattctactgcttttacctctctataattcatcatggctgcttgtcggtcaattgcccgttccatccccaccgtccgcgcagttccccgcacggtgtcggtaactgccagagctgcttcttccagatctctcactacttcttccctcgccagtctggtctcccgcagagtagccgtcccctcttcatcactctctgccactcgccgcttgcacgcaacagcgcagcgactcgtccaagcaacaacctcggccgtctccactgctactgaatacccaacaagccacgaaaagattgccaacccaattgacactgctaacttcattgacaatgagtttgtgtcatctaaggcatctaaatggattgatcttcatgatcctgccaccaacaatctggtcacccgtgtcccccagagcacagatgcggagctaaaggccgctgtggagtcggccgagaaggccttccccgcttggagggctaccagcatcatggccagacagcagattatcttcaagtttaccaacctcatccgtacccactgggaccgattggctgcgtccattactctcgaacagggtaagacttttgccgacgccaggggtgatgttctccgtggccttcaggttgccgagaccgcctgtggtatcaccacccagatgaccggtgaagtcttggaggtggccaaggatatggagacaagaagctaccgcgagccactcggtgtcgtggccgctatctgccccttcagtaagttgcccaccactttcaatccctccacatggatgctaattgttaccaagacttccctgccatgattcccctttggtgtattccggtcgctaccgtgactggtaactgcttggtcatgaagccatccgagcgggaccctggtgccgcgatgatcctggcagagcttgccaaggaggccggtttcccaccgggtgtcattaacatcatccacggtgccgcccccactgtggacttcatccttgatgagcctgctatcaaggctatcagctttgttggcagcaaccgtgctggcgaatatatctacgctcgtggttctgctaatggcaagcgcgtgcaagccaatctgggtgctaagaaccatgccgccgtcctacctgacgccaacaagaaccaggctcttaacgccattgtcggtgctgcatttggtgctgctggccagcgctgtatggcactgagcacctgtgttatggttgctgagactaaggaatggctgcctgagattgccgagcgggccaaggccctgatcgtggacggtggcttcgaggagggtgctgacctcggccctgtgatcagccccgagagcaagaagcgtattgaggacttgattgctagcgccgaggaagagggtgcaaccattcttctggatggccgtgggttcaagcccaagaactaccccaacggtaactttgtaagtcttactacagatactcatatatgtatctcaaactaattgtgcctccgcaggttggcccaaccattattaccaatgtcacccccgatatgaagtgctacaaggaggagatcttcggtcctgttctcgtgtgcctcaacgccgagacccttgacgacgccattgacgtgatcaacgccaacgaatacggcaacggtgccgccatcttcacccgctccggctcgaccgcctccaagttccagaaggagtgcgaggctggccagctcggtatcaacgtgccaattcccgtccctcttcccatgttctctttcaccggtaacaagaagagtattgccggtggcggtgccaacactttctacggcaagcccggcttgcagttctacactcagcagaagactgtgaccagcctttggaagagcgaggatgcgatcagcaccaaggctaacgtggttatgcccactcactcataaatatggtatatgcctcttgctttcttgcttttcctttagccggtcattcgcatgaaaaaaatttgtcttttcttgttaggcaaaacatacgccttatggatcccaatgaatgtatctgaattatatgcttttatgtcacgaaattcatgagtatgcacatggattgcagattgaacagtgtatgcagaattacaatcgcatactcgcttatgcggccttgcaaagtcattttggtagtcttttcagatgtgtttttttagatatacgtattctccacttctttagttttctaggcagacagcagaaaaggggaaaagcttagttttgcgcaaacgacttttccatgaagaaacgatctataaggttatagcatgtctatgatcaaactcacacttccctagtacgtactaccattaaactcattggccaggttgaaagctatattgacctatggtctatagaaaactaagaaactgaaagccctagaaaatacaaggctatactcaacacacgagcaagagcaagaacaagaccatcttactcggcaaccttacgctccttgaaagcgtaaacaagtctagcagaagcaaccttcccatccttaacgacaacaacacgacgagtatggcgtctctcgccatcaacaatctcaaatccccaaacctgctcagcagtccacccagactcgacattctgcacaaagctctgcaaaaacacgccctcgccctcctcggccaagaatccctcactcttcgacccatcaatgagagtctcgccaatcaggaacttcagcaccttagcgtcagcctcaggcgagccggccttagtctggacctcgaggacagggcgcacagcaccatcctcgctcttagtgccggcgatctggcgcgagcggcccttcagcttgccgaagatgtggtcgacgtgctcgcgctcttcccagtccagtcggcgctcttccttggtgccttggatgccgcctgtgattacttgctgcgcgtcgacgtggatgagcgcggggttctcgctgtctgcgtactgggtgatgtagattgtcactgtcgcgtatgagagagtcttgcgaatgagccagcccactccttgctgtttggattgttagtggggttgagttgttggatggggtttatgtatggtatggtatatgtagggcaggggataataatgattgtggttatgctgtgatttggattatgtattgtatgattggagtatcgtgacagggaatattgtgacaggggttgtgaaactcttggctgttatattcgagtaacccggaaggccggaaggttagggcttggagtgcataccagagataggatagggtctgtcgggttagaatgggttgagtcctgtgatacatgagtatgttgttatatggcttgttttatttaagcataccatctcccattttccattcaggttctgcatagtaatatcagcaggggcggccatcttgaaggttgatgtatagtatccggttgatgcgggtatggcggggggaagtggtaagcaatgaaaggacaatttggtcagtagaagaaaaattcgaacttcaaggggtaaaaagaagaaaatagaggaacttccaatgtcacctaatatatagttgtcttggttaagcaatggtcttcaagcatgtgtttattctcgaatccgaggctagaagtcacatgatctgatgactgtacatgtgattaaggagagctcggtgtttacatacttcgagagctacaatccaatcatgtcgttcaataagaaatatgccggtcttcctgatctagtgagaattcttggctgatatccacggggcttctactgactgtgaccaaggacccatccccagatatctatgaaacccccgacttgaccgatgaagcatccaccttgcccgtgagttcgccaattccacaccaaagagacgtcggcgggcccagtcactgatcctatctagactactactatccgcacagactccgaccatgatgacgcaggctcaaactccgatatcgaccgcgagggtgtcaaccccgaccaggcgcgtttgcacttcatgggcgcggccgtggacgcccgcgacgtcaatttctcagatagcatctccatgaaacggcaggcctaccggagcaagagcatcagccgccgccgtcgacgcagacgcgaggacggggtggaggaggttggtgacctgagtgatagcgaggacgagtcgcttgaccggaggcttgcgcggctacggagagaggtcgaagatctcaaggtggaaatgaccaacaaaaccgacagcccagatgctgaagctgaaaacccaggagagaacctaggtgatggcgttgcggagctaagccgcgctctggataatctgcacgcctcgcgaggtgcagcgagctcatcgcactcggctgcggctttgctgtctcagaagcttaggcctgagactcgccctgctacagacgtaaggagacaatcctcgggggatacaccaagggcagtgcaggcgccaactgcctcttcggcagggatcctctctcacgcagcagcatttgacagccgcctagcgcttcttgaaagctccctcggtgtctccagtacttccaatccattcatcgccgacggcatcaacgactcaacgtcgcgatcagtcctcccagctctggaccaactcacctcccgcctgtcagcactcaccggacttctcgtcggcacaagcccagcagccacgacaccaggagtgcccaatgccgcgccaggaatgacaaccccacacctggaagctctctccacgcgagtgcgaaagctgaccaccgatgccgaggcgctcaccgcagcccgcagaaaagccttcgaggccgcaaaggccgtccacaacgcccgtctagcaacttccgacgccgacgtcgttcccgcactagaagcatcgaccgacgacgaccatgccgccaagatccaagccctctacaccaccctcccaaccatccagtccctgcaccccctgctcccgagtgtcctcgagcgtctgcgctctctgcgcgcctgccacgccggcgcagcccatgccgcggactcgctcaacgagctggaaaagcgccatgccgagatggcctcggagatcgagcagtggcgtgaaggtctgacgaccgtcgaagagaagatgcagcagggcgaagctgctctccgctccaacgtggaaactgtcgagccatgggtgcgcgacttggagtctcgtctggcacgtctggaaggtcccgcggcagtctaatccatttcttgtctactttttttgatctgctctgcctggggcagaggtttgatgaataatacccagtttgcatgtacgtcgaatgttgagggcatattgtagttatcttcaattgtcaatatcggttctataccagatggccttcttttttatatgaaagactactatagtgttactgtagacagactagactgtataccaccatactaaacattagatccctccctcacccgcctcaacacctgaaccctcggtctcatcttaacctcaacccaccacccacgcaacaaagcactcctcatatactcgcgcagaccctcaaacaaaccaacagcacgcacaccagcaacagcaccgataacacggcgctcagcagttcccgtagcaggagtcccaggcttcaagatcgagacccccgcaaacgaatctaccacaagcaccctctcccagtccgaagcagggagcgcacgccggagactgctctcatcagcatccatgaacccggcctgatcacccgcctcgacaacaacataatcgaacggctcccagaacccactagtggctttcacagtcttgtcttcggttttgtcgtatacccaccccgacgaagggtgttgttgcacgaagcgcgttacgcccgtttggcaggcgaggttacctaagtagacattgatcggcgcgctgctcttctcagaacgcaagcccgtatcgtggaggacagagtgttgataatgcatggcgtcgagagcctgcccaccggggtaatttgccgcagacgcaggaaggagcacgagatttgacagacagaaggtggcgagtgtcgtaatggccagggcgcgtgtcgccagtcgggcgaaaacagagcgcgagcggtgcgtccagagatatgcggcgccgagggctgctactgccgtcagggaggggatgatgtagacgatgaagcgccattccttgtgtggctggaagctgtacagggcgacgaaggaaagcgccgggatgagaagtgccagggcgggggagcgcgtggcgggttggcgtagtgcgacggggatggcgaggaggtaggagaggggattggagaggaggcgggggagggaatttaggaagtagaaggaccatggctcggtaccccattcggaggactggcctgctaggacgttgaagcggaaggcttcgaactccggccagagggggaagcgttgccagaaggtgctgtcgagatagatggtgagggcgagcccggtggtgaggcctactaggcccgcgatgatggtgtgttggaggttgatccgtcttgttgctagcaggaagagagtctgggttccgactaggagggctaactcggagcggaagactacgcctgccgtggtgaggagcgcgagtgctaagccgcatttcttttggtctgatgttggacgagggcctgggagaagcagaaacattgctagtgttgtgatgctgaaggcgaacatgtttgataatggccttgaggcatagaatatcaagtggaactggcttgcttggagtaggatataccagatggctgttagctggccgaagctatggcgcaggcctcttgcatatattgctagggaggaggcattgagtaggcccaggatagctcgagctggatgtcggtgttagtttgcttgatgtatcgcactattatctatgccgtacctaatatctgtcggttgatcccctcattcaacaagatcacaggcttcgaaagcatcgcgagcgccatagcgccaagagcgctccggggaacagccccggggaaagagaaatggtcatagtcggtgcgattgagattcaggtcattaaagccatttggcaacccgttggccaaaatatcatgtacggcctggacgtggaacgactcctcgactttggtgtatggagcgacgaggagatgaaggaggatcaaggctgggaagagaagagcgagaatcgcatatgctataagaaccgttagcttgttagcttgtgttgttgtacagagcgaacgaactatatcccatggtgactgcatccgaggagtgtaaatccggagatctggcgcctcccgcacttcacctttaacatcttccccaacccgcaaagatgtttttcttcttcggccttgggaagctgttttacggtatgtacttgttattccaactctccagcttatgctaataacccgccctccagtcatcgtcctcatcatcaatgccatcgccgtcctctccgaggaccgcttcctagctcgcggtacgtccctcccagctacagcccgtctagaagaataaaacctaatgaataccggaaacatacagtcggaatgggtcgcacacaacccgagccaggcttcggcgcaacatacgatagcacaagcgtgaaagccaagtccgtcgacctgatcgccagtgtgcggaccgtaatgcgcagtacgtttcccaaccccgcgaccatacaaccccggtcctttatctcgaatctgagtgacagctttcaacctgaataagtcgcaagctgttctactcgataaccgagacgccagccacggcccgatgggatagatacatagctaacacatccgcgcatccagtaccccttatcgtcatcaacacagtcatcattgtctacgagctggtccttggttaaatttcgctttttcgctatttcctccacgcgccgaatgtcgaactcccgcatccgtcgcaacccagctgcatagtgacccagctgccctgccaaatctacatcactgttcactacgacttgacttgcgctgtgacctcccctccgatgagctattcggaatccgacactatatcattaatgacaaagagtgaaatggggcatgatccatgcacgagcgaggagcataccgagggcagaggggtggtactgaaaaaccgctgccaggcgtctacttcatgctgcgctgggttaaggcgttgtttgagatgacaggaacggtggtggcgtgcagcgaatagcccgtcttcccctcgagttcgttttgattacttctggcttgtaactatatacccaaaatgctagaattgcaatggacactgatcgcgacatggtttacgtgaatatgtgtaggggattgtaatagggaaccccttggctaacggggcccccctctgcctggttctgccttattttgccttacacagaaggcatcaattcaattctgccagagtcaagtgactacacgtcggttgggccatttctttacagaacagcaatattacgcgtatatcagcgaaaaatttatacaaatcacggccctcttaaattgagactttgtgggagatattcaacccgcaatgacagactcatatttcttattctgatcacctcatctgtgagcgaatcaacgttgagtcaccgaaaagcgcctacaatttcatccctagaaatcatggactttttcttctactgttgtgatggtaaaactcattacttagtcatctgtgtctgcatagttaactaactagttaactaactaaataattaactaaagaagcaaataattcatttcatccggttcagcgcagctcctcccgcctagagcgcagatcctcttgcgtggacatttgaatgacgcgctatcttgtgcgcagtttgtcttcgcatagggagttggatagaggagtgtgaaggaggagaaggaggaggaggaggaggaggaggaggaggaggagaaagtggcagagtcggcgtgagctccagatgttccgttggatcagattatattgtttactagatcattgaatttctctcctctctaaatagttatatatgcacaaatttgtcatactggatccatgtgattgaacagacagttcacgactattcgaaagaatgaatacaatactgcatcctcgtttaggcatcctccaagttcaagttgcttattgctaatagttaggtgtctttcaaagtgaattgagttccatacggagtcgggaacggtattctaccaacgccgtgtgacggacttggcttagggctaagcttagcgttcggactatctaatccaccccatgtctaacacctaactcatattgacaaaagaaaaaaaggagaaaccaaagcaagcttcatctagatcaaatacccccgcaaaggcgctgtcaccttgtaatcatcttccagaccaaccactagactaatcactccgtctggcctcaccaaagccagtgcacccacgcggggatccacgcctaataaagcatgccctgaagcatgaggttcttcgtagattcggtacttccactgcggcagcggtgctggcaaggcgtctagattgacctcgtagcggctgttggtatgcaccagaaacaggtccacgatgcaattccggttctgcgggttagtgtagaagatatcctcgaagcctcaggtctgactggacgcaccaaaacacgagagggccgacttgggcgacgccaggtagtctgtcagtgggcccaaacgaccctcttggatcgccgatccaacaaatgcaaacaagtgaaagcgtccattggaggggggttcgttgagcaagttggccgctattccgtcaagatggcgatagagatccaccggatacagtcgcttgccgggggttaatggctcgactgcttggcagtcgaccacgaagggtgcttcgcagggccgtgtcaaaggtcctggctggtactggtgaccaactccagaggtgaagccctgtgccttcttgtatgtatcctggaattgcgtatcctcacggaaatccttgcgcgagaacagatgcgagaactgaacatcaaagtcaatcagctcctttgccatctgccgtcgctccagagcataagtctccatcaggtttgcgtgggccctcccctgcagcaccaatgccagcttccatgttaggttgaaagcatcggccacgctagtgttcagcccctgagcagccgaggtgctgtgtgtatggcacgcatctcccataatgaacacgcgctttccgtcccagaactagtccacgatgcgctgttgcaggcagtattggctgatttagaggatctgatcgatctccatagtagctgccggcaatatcacgcactttctgccgtagcagatcttccagagccacatcgctgtatctggtgtgaccattcatggggtgagccttggggccctcctcggccatctggcggagatcgtcctcattaagcagggtgtacaccccgtttgtatccaacgaattggggatcaacatcatgcgccccttggcggatccggcagatggtagcgtcgcggcactgcctggtcagacagccgcaaaacccaattatctgaatcaacggttcctatcgccggcgtagttctggaaagttgctgtccaattgcatatcagccacacaccagacctcgccctggcttccatgcttctcccattcaatacctagcagctaacgggtcttgctgccagccccgtcggcacccaagagatatttggtgcgaatagtagagaggacattcgaatatccgtgcttgacaagaacatgcagaggatactaggggtcatcttcgacgtaagtgaaattgatcagctccacaggtcgatccacttgataaccatgcgcctgtagctcttcatcaaaggcccgctctgtctctcgctgtggcacgctcaggatccatgggaagggagtcgtggtttgaacctcctggccaacataggtgcaatcgagctgaccgagatcgttgttggcccaaaaagccatcccactgacgtgtttacccaggatgtccaggtggtgatggatgtttagagtctgcaggacttcctgggtgcgaggttggatacctggctcgcgtatgtcaatgccggcttttcttgtttttcacgacaaaaataagtaaactcacctcccgcatgcccagtctggatgcgccgagaatgcacgtcaatcactcgaacatcgatgttgtagcgagccagcgtcagtgcagccatgaaggcgacagggccagaacatcgcatttgctatcggagaccataatgtggggttggtgatggcgaaacttggaagacaataagttgcgagggcccatcgatttgataaatataaagattggcaaggcttcctatattatcacaaccctcccaacggacattcggaactggacgttttcgggcggattgtccccgcggatgtccgacatctggaccttctgatgccgtatttttcgccccttgtccggtgactgtctatatttcagagattttgcgagtcgagcccttgataaatggacgcacggggcagccagagctccattgggaatcatcctcccctattcgcttgccagggcggtgttgttgaacattgagttgctttctctacgatccgatactggggacggactaagtagcaggcatggatttcgacatgtggatggattccaatttaaatactcgtggatctatatttgtaagtgtctgtagctaccaaacaacatttgaaagaacatttgaaggccacatgcatataatctccaagcactaggagaattcaaatactgcgaactaagtgtaaagtgcatcgtgtctaccttctctacacactggatctaccagtcagcttgatcacttggcctaatacattggggagaagttagcaaagtcatccatgggcggggagattgaaatcatggcgaacataccattaatccattccccctcttccgaggcctaaaaacacacaacccgagcaacatcgagtggttgagctctgcgtcccagcgggtacaggctggcgatacccttatcaatctgctccataggcataccaggataaccattgggggcgtagtaccacgagttctcgagatacatgtcggtcagaatacctccaagggccaccgcgttgacggtcatcttcttaggaccacagtcagcaagcgaagctgcgagtaaaaccttcgacggcggccttggagccagcataaagagcgtgattcttaacacctgtcatgttggccgctacggacgagatcaggatcagacggcccccctcagagccgtacttcagagcatgctgggcgatgaagaactgggcgcgtgtgttcagcgcaaaggccttgtcatacaggtcctctgtcacatcctcctccgcggagaaggcttccatccccgagttggacatgacgatatcgatcttgctaaagtgctccaatgtttttttcaaacaactgcgtcacctccgacggcttggtcacatctgcttggatggcgatagcgcgtgggctgccgggcaaagcctgaatggcttcgataacgccctgtgctggcccagcggcgtgagcatagttgaccacgacataatgcaccgtgtgaggcgagctctttggcgatggacgcgccaaggcctcgaccggcaccggtgatcagggcgactttgccgtggagatcgaaggatgcgggcatggttggtactgtcaatatgtgtttctagagatgaaagcaattttgtgggatcaatgttttgctcgacctccagatttccatacatataaacaattactactcaatatcgagcccatcttccctccgattagtgtctatatccccaccgaggaatccgcccctaaatgcgccatcttccttgtcggaaaacgagccaatcatatgacactacccgatctcgacgaagctgtcctactttccgatgtctatcttttctagctatcgaatgtgacgatctgggaaggatcgcacttgccaaaccggcaggaacgacctacaccctcgtaccctcgctccttccagaatcagcaacaggattaagcgaggaaattgcgacttttgcattgaatgcaaacacaaggtataaaaggggaggaacaagtgcacagtagtttttctcttttcccttcttcccttgtacttagaatttggtttgcattgcactctttcttctggatcgaattggcacgtaacatcgaagcctttattcgacgagactagggtactcggagaatgacttctcaagaagtaattcgcgagttggatctaccttatagcgaggtaacctttcgaacgtttttaaaggttcatggccttcgtcgttacgttgctaagcgaaaaagtttttaagtgaacggaaccgacggcgtcgcctttaatttaatctcgaccactgagattagaccttcgaagattggataaggtcttttagactaactaatgaaacctaggtttcttctagttgtcataagagaacatatattacccacgagcggtttgagaacgaatgtatacacaaagacaggcttaaacaagttgcctggatgttctggggatcgattttctgggagaagaattgggggacaataaacgcagactggtatcaagggcatatatgccctttaatcaggcgtttggttcgtggccggggtgagagctatgttatacaagacggagcgccgtctcataaagcccgagcaacaaaagcattacttcggttaatgggtgctgttttgctagattggccggcgtactcacctgatcgaaaccccattgaatctctatgggatctaatgaaggattgattccagcgtaactatccacgttacgagcggaatctggatactatacggcgtatagtccaacaagcgtgggatgctattccaaatgagagggtgagtgagggtcattgagactattcctcagcgtatgcaggacgttattgatgctgagggggggacactgagtggtagagagagagagagagagagtcctggaattagaaaattagaaaagaagaaaaagtactgtactcggttgttaaaaaacaagaaaattactagcgtaaaagcagttgttgacgatgaagatgtgataaaaatgacttaattttgttagtggtttccgtacaaactatattgtaggtatctatgttgtaatctaccattatcctggcctggtcacgtggtagctagctactctatagtgacttgcacctcttacacattcagctataccttttcaacaaaacaaaatattctcatgaccatggactcacagaaagatactacatccataggcagtgacagctctaaggaaaaccacccaccgacaaaatcagcccagcaatcaccaacagataccgatgatgtggaccgagacaccgaaatctcattagaaaaaatcaaaagtgcagaccaggcactgagtgttatcgaagatagcggatttttcaaacagtcgctttattcgtttcttgtcttgacttccgtgactgaggaggtcggacacaacctacttcaacttctggatcaaaaacacccacacgtccgaaaaggcttcttccttcgcaaaaaagtacttaccctcaaaataccgagttttacccatgaggctccactcgcctggttcttcgatcagcttttacagtggaatttcaacggtcagcttacacaagttgaggtgcggcgcgtgagggtgatggcaagcccgcgagtaacggcgcaatttcctggctacgtcggcgatgagaaagagcctgatacatatatcactcccaggggcaaccccgcaactggtcatccaaccgtggtcatggaggttggcttcagccaaacctactcaagcctagtgcaggctgcgaaagtctggctagagggtgttggcccaactgtacgcaaggttatcctgatcaaattcttccggtgcaagagcggaatcgccggcacaatcgaactctggggccgggacaccacaggcaatgcgagaatggtctggagcaacaggatcttcccggttcgaggccccgtcgaacgacctatctacttgactcgagaagacatcttcgacggcgtggttgagccaggccgccagggcaccgatcgtcttgaccttgatctcacttctctccgcgacataatcgtcgagacggggttggatgccgtcgggctcattcctgcgccttgattttttttttttttttttttttttttttttttttttttttttttttttttttttttttttttttttttttttttttacgacatgctttcgcggaggtgttaggtgttagggagtaagtgggatatggtgatttgcagacctgtatcttgtattttttctcttattttttatccgcgccgatgaccggccttttaccatctttttaccatgcatggacgaccagaatgaacactgcatatacgcagaagtcaaaccaaaaaagagaaagattcgctcataacttgaaatgagatatgtaagaatagtttaaaacgcccaaatccgagagacccacgctcgccagcaaaagacaagacagcaagcagcaaacccaatacgcctcttttcgcaaacctgccaggtttcgatcctgtcagtgtagcttgtacatgatacaaggagcggcagtggtgaaaagcaatagcagcaagaaagaagaagaaaaaaatacagatcaaagagcaaagtacaatgggaagagcagaaaaggaaaggaaaggaaaagggatgttaaaaaaagaaccggatctgagatccaacagagtctagaaagacatggctgtggaaataccccggcggggatcgaggacctccacagaagaatggaagatggaggcgcagatcataagaacatgatagtacatccataaggaagctatgtgcagaagcaaaatttgcgctcatatgtgcaaggtgctaagatgatagggggtatctccgtgaaagtcgagctgaagacgtgagatgaaaaagaataagtgctgtctggaaacgaaaaaaaacactgattgtagttcatgccaccttcttgaaactgaaagatctccatcgaggggtatggccgggccgcgtgtggttggtgggttggtctttgaccaggtctttggctaggtctttggccaggggctccgaggtccggatgggttgtttgggttgcttagggtgggagatgggagggaaatgtctcggggaaacaggcgactggactggcggctctgtctcgagggatgcttctggcacggcttctgcaaggagcggcgctgtcgccatgtcagacatggagactcggggctctttctccttgctgagtcggtggctgaaacttcggctgcctcgtttcaaaaagccgaacccggtcgacttccttggtgatccattttcagcagcgaggtcggctgtgtcggctttgctggcctcgatggctcttctcaactcctctgcctctcgtcgctgcatttctcggttgtacatctcctgctctttctggcgatttctttcgttcttctccttctctttctctatcgcccgacgttctttccgtagttggtgatcactcttctttgggctcaatggggtggtttgttcgtcagggattggagggagaggcggttgaacggctcgcggcgaagctgcttggggctccgagggttcttctgggtaggtgtgcagttggggtgcggttgggattcggttgagaggagtgaagggggttgtgtgatcaggaggcacctgtgatgcactttgggcatgggcgagaggtggtgagaagggagacccattagccttgccggcctcgcttgtttcggctgccccggccatgggggcctgattctcttgcgcctgctcgcgcaggacagcctcgatagttgtctcttgatagaaaagaacataggcacatgcgagtccgggtcgatctccaaagaagttgcgcacgtaacttttgtcaactggttccacgagctcgtcgtcgaacagcagccagccacggtcttcggtcttgataatggcaacgtagtggccgtgatacggtcctccgccaatgtgcaccaccaccgcatacaattcgtaaagacggtctggatcctcggcatcgtccgtggtgttaaatagacgaagatggtagggatagacgacgcgatggaacagcttctgcagtcgctgcaagtcctctgtgtatttgaaacgcttcaaatgcaaagccagcacacgtggcaaacgtttgatcttcatccgcttttccgcttcttgcagtccgccgcagttgtcgcagtggaacttattccgctcacagagcatctcctcggccgagaactttctcagacaagaggtcacggacgaatgctgctcgagatccaccgataaatccaagaatacttcgtctcgctgcgacaccttttcacaggtgagacacttggtctcggacgtcagagtcccctcgaacagctcgtgaacccatctggtagtattgggcgatttcgaacccgtgctagatggcaccattcccaaggagtcggcacttgctgttggtggcagagccttgtcgatgaatgcctgcttcgtggcttccgtttccacattggcgacgacctcgttgaggagcaaattcaaaaactcatgcgcatcctggtgcatggcggtccggaacatctcgtgctcgcgacggagaatgtccaagaactgctgcgggcgaacgataccaatgcgtgcttggcttcctacgaccgattcgaagatgtccttgagcgaagtgaacaaggactccgacatcccataactggtcgcattgttcttggtttccaaaatcggcagggtctgaagtgccactttcttcttgtattccggcgactccttgtcctccggcttctggttgggatttgggggcacaccggcctggcgcgcggatggtggggacgaggccttttgtcgggcagccagcgcctcggcttcgaggtgggcatttgggttctggtaacgtaggttcttcgcgagggcagcctcgaggctgtccatgggtgtgcgttgtgggtagttgatgacggcttcgcggaagggcactgagtaatagagacattgcaggatggagttacagtaacaagtgtttccatactgaaagcgcggggggattgtggtcagtgccgttgcggtctcagcagactccggggaagtccgtgactcacattttccattccataaaacttgtcgctgccgtcgtcgcggatgggacccatgtcctgcagcctcttttccagaggggaaatctgcggtacctggaagtcttttttcacgggtggcgccgtggccggggggtttgaagcctgcgcaagtgaaagtcccagtcagtggcggtcccaatccgaatggtctcacggggaccgaagcatctgctgtgctaccaggttgagcgagcatggctgtgcggatgtatggtcactcaccccattcttggagcccttggagaagagcgccttcatgatggcttaatggtcggtcgcactctgcattgatgaggcacagtgtgtggggagtttagagatcacaattcgagatcggcatacgaagaagggggggggatgatggagaaggaaatgaagcgcgtccggggaaataaagtgattgtcgtttgatcacataaggtttctggggtccggtggaaatgagaggggcgggagaatgagagaaggcaccgagttacggggtaatgtgttaagggatattagggagaatagattagagatgtctgatccagcaagaccagagttaaagagaaagaaggcaagtaatgtgccaagtagcagagacaaggggagcactggaatggacccaatttattttattgtagtaacatacataagaaccagtaacatcataacaatacaatcacttcatctgcaaccgaatcgtccagaaaacacaactcatatcgcgacctaccccatccatcttagcctctctccacgtggagacctaaggcaggtactggtccaatcgccgaatttctgcctctagcaggtcctaagccggaatcgaagtctttaaagaggtacaacatcctctacggagtacggaggacaacctcaagtaaagaagaaacaccggatataccggagccccatcttatactcattggccacaacggtttcccccagcggagcagccctcctccccccacgtccatggatgagagactcctcgaccaagaactcctcggccgtgattggccaccagccaccgtcgctcacgggccatgtgtccgcccctcgcatggcgtcgccccaacagccaatggccgcctgtgtggtggggccacgaaaggtggcggtggacccggccccttccaaagttggattgttcccacggaatcttttcctgttccttacatgaaactcttttcgggggggaatcgtctagaccggaagcatcaacatctagattccattccgaggaataccttatgtcgaatgtgtccaggctaacgtcagcctatatcaatgggagtcggccccttgcgggggtccaataggcgcagcaataccaatccagtcattcctttggtaccacaccaacgcacgttcccgcgatggggcactctgttaatctggctaatctggcttcaacgtctgatcgaactcacatatgatctgcccacgccaatgggaggagcaattaaacgagcaccgacatacaatccgacggcactaagcctgtacagcacgtacatggcgggggtggcgacaattacctctttcaaggggctcaagaactaataataatataatgataaatcgcatgttcggccggcattaggagataggaaggctacggaggccgtagtgtatcagtctaatcaggcttgggctaaccagttacaacccggattaatatagttctgtcgcaaatgacgttatggactgtggagtagatcgattgagcgatttacctgcatgtcatagccctttcgacaatgtacaacacaacaatgtactatatacctaccgcatccaatatcaaattgtcacggtatgatgacatcggaatggacgtgccccaaagaggaaggagcataagccggaaggatttcgggtggcagcgtaatttgcagaggcagatccggggaagtccagaacttggctgtatacgcctcgacgcttaatatgtcttatgaccggtatgctttagagtctatatactagtaggcattggcaaggcagccaggtgatgtgagacatcagatcacagggacatttgatctcaaattcatacactccatagttatgtacatgccactattataccaaagagaccatcggataaacaaccccaaacagaataaaccggtgttatcacgtgatgaattgcgctctatatggcgtggttattgtatctttcacctatcatcgaccttagattacttcgagaaaaaactcagaaaggcaaaagacctggctcaattatgcagttatgcacttcaggttggacaaggggcaatcctcacctcggcggcgccagtgaggtctttgatatccttgaaaatatcaaatatacatgatgagttgattttgccctttcgtctgtcgccgcagttcaacatcccaaagacctctccgctgtgcgtataaacctgcaattgagagttgaagaagaatggaacggattgaaccaatccagtaggctcgtaagagaatggctacaagagaatatattagccatataataaatctccaatgaacagaatattatcttactcggttgccttcaaccttatcggctcgggacaatcttcatcaaggcccagtccatcatgatctcttgacctttcgcgttaatttgtgtccgattcaaatcgcttccagcaacaatatgtcccaagggtcattccaaataaaagcgtccacgattagtttcagacctgcaggactcctctcgaactctgcgcacctatcgacatgttagcagtgtccagcaatattcggtaataccacccacagattaaaatcgataagccacaggctgattgaccggcgagaaatgtcaaatcgatgtcctaggaagtaacttccattgtcgcgcatcgtcgtaaagggttggcgtagtgcttcaatgggcctgattggcgtagataatcccctataacgatagtgtggctagggcccagtctttgctcgaccaggtggtcttgccgggtattactctcagtcgcttcgtgaatttgcatgtaataaaggcgactgcgttgaagttgtgacgggaaactggcaaaccggtgacaaagtcaatgcatgacatccatacgtcctccttttgggttgcttccagcttcagaaatacttcggttttgtattcttcgatattatcatctatcgcggcgatagtatattggagacctctgaaagatggatgatcaactttcaatacctctggggcaatggtgttgagtgattccttgaatctgagggggctctattcccagcgcgaaagcgcggcctgcccaggtgtgctcctgtgatttgtaacatttgttgcgggcgctttccttctgggggccaaacggtgtggaagcaagttagactataggtgcgccattccgattcgttgggtaaccgtagctggataagaccacccaatgtggatgttccggtcgaattaccatggatacctatgctgacaccagggattccttcccgtccttcataaataggatatcaacgctagattcctgaaattgtaaaagtcaactccgaatgatctggcctgcggtatcaaaagacccggtggatgtcttgtcaacctccactattatagtcacagggttcagatgcctgtcggtattggtgccataccgccaacattcaataccagtccactcctggatattcagattcgccagaatagtatcgacaattgacctccatttggaatgaatggagtgggtctgttcaacggggaaacaatacagtccgtcgtaaaacttctcttcgataatctcaacagaggttccaggtaggaggggctccaaaccgtggtagatctgcttggcagcctgataccaaagatcaggttgcgggagatctggcatgaggacaagcagggttggaactggcataggttcagggtcaacctttgacgtgcggcccttcagaatgacattggagaattcgatctcgagatcatccaggacttttttttagcacgcacatggatctgcgctggatcgtgagtaaacgtgttctttgtcgtcgccgctgggagagaagttaaaattggcccacccgcacgatgagaagacttgagaaagccgctgtggtcaacatataaacctccaccaagtggagaggaagacgaggtagaagagaagctgagcgcgtgcgcactaccctactgaaggccgaagatacaactgaagattcagacattatgaatgtctagaggctgaagaaagcagatccgtaaggatacaagagtcgaggaactgtcaaagatgaagtaaagagttgaaggggtagagaagacttaaagagatacaaaaaatagtcaagaagagccagacaagaggtagacaagacagagagaagagagagaggaaaagtgcaaggtgaagtagaggagagtcaaggaagagacaaaggcaagagaggtccgaagcctaaacaggaaggagccttccaggtttacataattcacctgggctgccaccgagatcactagtatcaaattaattgaatgcaacccgtattgaatgctcgtgatggcttgattgtagaagttgaggtataagttgagatgctgcacctatcttcatctagatcaggtgatctctcaattcaactgcacctgtttggaaccgacgtgtccgggataaacccaatcgtttgtttcgcagcgttctttttttatgccgtccattcctgttccttcgcgctctgtacaacgagcaattgccaatcaattcggtcggtctccaatttctcgtctggctcattgcccgtccctgcagaatcgtcgagtcatcgcgaataaaaataatatccctgcccccaccatcccccaccaaataatttctccccgccgcactcgtcagttttcctcctcccatcgctccgccgaatcaagcacaatggggaaagaaaagggtaccaacttcaacctcaagaccccgaagggcaccaaggattggtccgggtccgatgccctcctccgagaccgcattttcaccaccatctcgaacgtcttcaagcgccacggcggtagcgcactggacacccccgtcttcgagctgcgcgagatcctggccggcaaatatggcgaggactcgaagctcatctacgatctgaaggaccagggtggcgagatctgctcgctgcgctacgacctgacagtgccgttcgcgcgctggctcgccatgaaccccgaggttcgcagcatcaagcgttaccacatcgccaaggtctaccgtcgtgaccagcccgccatcaacaagggccgcatgcgtgagttctaccagtgcgacttcgatatcgccggtactttcgacgccatggtgcccgatgccgagatcctgcgcatcgtcagcgaggtctttgaggagctgggctggagcggtcgctacaccatcaagctcaaccaccgcaagatcttagatggtgtctttgccgtctgtggtgtgcccgaggacaagctccggccgatctccagtgccgtcgataagttggacaagatgccgtgggcggacgtgcgtaaggaaatggtcgacgagaagggtcttgaccctgaggttgcggatcgtattgagaaatacgttatgaacaagggctcgcgggagctgctcgacactctcctggaggatgagaccctcaccgctaatgcctccgccaaggctggtctcgaggaaatggccttgatgatggactatctcaaggcatttaatgtactagacaaggtctccttcgacatgtctcttgcccgtggtctggactactacaccggtgtcatctacgaggttgtcaccgagggttcggccggtgtgcaggccgacgccccagaggcacaaaaggccgagaggtccggcaagaagagcaagtccaagcagcccaccgaggacgacgaccgatccaacgaccccaccctcggcgttggcagtgtcgcagcgggtggccgctacgataacctagtcggcatgttccagcccaaggcacagatcccctgtgtcggcatctcattcggtgtcgaccgtatcttctccatcaccaaggcacgtatcgagcgcgagcagaggactgatgcccttcgcagcagcgaggtcgacgcttacatcatggccttcggcggcaagggcttcggcggcttgttgaaggagcgcatggaaatctgccagaagctgtggagtgctggcatcaaggtagactttctatgaacattgattctgaacaaacactaacatcacttcaggctgagttctcctataaggtaaagcccaaacttccccagcagttcaaggccgccgaacaaggcgccatccccttcggcatcatcctcggcgaggacgagatggccgccggcaagtgccgcatcaaggagatgggtctgcctgaaggacaccccgagaaggagggtgtcgaggttgaaatcacctcgctgatttccgagctgcgggaccgtcttgcgaagaagaaccacggtcttgtctcatcgctggcgcagcagctgcagggcaccattgtttaggcgattaaacaattgggtctgcattttcatttcgtttttttctttagagcgtgtttttcagaggtttctctgttttccctactacgtagatctcttgcattgtcaggcttggagctcggcctatcaaaaaggactggggggttattgttgagaaaaaagaactatatttcagagatgggttgatgtctttaagaattaccaaatacccaattcattgcatttcccctgtgctttggtttgatacaggtttataatatggcacagcatacactatcagatcattcgagacgattcagcgtctcgaaaagacaaaggcacaacttagtataagaaatcttgcatataaaaggactagaagtacaatacacagagccatacatatacacaccacaacatcgaaactaatatccctccgcattcttcatcaagaacgacttaacaaaaggcaagcgatcaacgacgccgagtccaagactacgcgcccaagcaaccggcccttcaccaggaacattatacatcttatgcaggagatcgcaagcgccgccgatcttcgcattaggcaagtaccgctcagacgagtaccgctcaagagcaagcaaatcaccgatatccatgccatgcgagacagcatactggatcgtcttggagagcgacgcaacatccgcctggccgaggttcaggccctgaccagcgagggggtgaatgacgtgtgcggcgtcgccgacgagcgcaacgcgcggcgagacgtactgcgcggcgtgtcggaagcgcagcgggaaggaagcgactgttcctgtctgcacacctgttgctgggggagggacttgggctgggaggggggtgtgctggacgcgccaggcgagttcgtcttggtgggatggggtggaatcggaggaggaggattgcatgcccatcatgtaggtgaggtctgtcatgtcgagacggaaggcggcgttgaccatggcgaggaaggccggggtggggagggactttaggtaggctgcgtgctcgggggtcgttgaccagacgagggtggcgtggttgtttggcagcgggaggagggcgatggggccgccgagagcggggaggaagcgctggtaggctgtgcgcttggaggccgggaagggcgcggtggctggctcggcgagagcgagggttgcgacgatgccgtggcggccgtagtcccagccttgggtggggatgtcggcgaaggtgcggacggggctgttgataccgtctgcaccgacgaggaggcgggccgcgatgcgcttgggtggctctgtttccgcggcggggcctgtgggcttgacggtgacgatgggccaggctgagaggtcgggaccgtcgggtttgaggtctgagccgttctcgatggaggcgactgtcgagtttgagaagagggagaggttctcgtcacctgagtcggcgatgcggcggagcagggcgcgcaccaggttcgcgttctcggtcatggttgctacagtgcgcatgtcctcgaatggggatgtctccattgaccaatcgaatgatattcgggacccggtttggccgtcccagacctgcatgtcctggtattcctgcacgcgactaacatcgagcttatcgtaggcgccaatgctacgcaggaacgccacggtcgagggggtcaagctgctgcaccggttggagaactggttcggttcgaggtcccaggctttggctttgcggagatcttgggtctcaatgagggcgactttgagctttgaggtgataggtgatgctcctgtagtagcattgtatcagtatatgccctgcttatctgcgtatggtatacatacgaagtgcggccaatagccctaggcctgccggcccgcctccaacacaaaccacgtcatataggtcgggggaatccgatttagatgcaaattgccgccgaccggcggtaatgccatgccggcaggttgggcagacatacggccgaaggacagctctggagattggacgcatcgtgtttagtgattggaggttgaatcggatgatcgccctcaagatagacttgcagtgcaaacagtacaaacacctgcatacaaccccaggttatgtccacgctggttatggtaatgcttcttccttttttaatggctcttgataccatataaaagttcatttcatcgctattttacttcatctattgaatttacacgaatatatgaataaatgaagagttatgatggtattgcgggtatgaaacatagcgacagcaacaaatatgaactgctatatcagactcggtctggaaaatgaataaagcatgctgagacaaatacctaaatacctaaacgcttccgacagcagccgagtcagagtcatgttcaggctcagcttcgccttccatctctgctacgaaccgctcccacgtagaaagcacgccctgatagaactcgatgtgcgaatcggcaaaggagccaagtccgtctcggaactcgaccgccttgatacgttcgaaatccgcgacttcgcggatgacctcctcgtcaaacatctcggttgtggttttggcggactcgacctcgcgggtcaattcgtcaatacggagctcaagcttccgcacacgctcgcggcgggactgttcgtggtcaacgccgcgcatgtcctccattttagagcggatgaaagaggccggagaagaggtgagcggattagaggcgtagtaagcagctgggttggaagccagagaatcacgctcggtcaccgctttattgcggtaatcgaccaaggcctcgaaatcgagctgtttctgctcccgtgtcttcagcagggacttgagggacattatatacgattcggtatcgcgcagcgagcccaaatagttctggtcggtgtggtccttcagtccgcgcatcccgcgcgcggtctcttccactgaagctgcaaagacctgcagtggcatctcaacagcaggctctaacgggacaagtttgcggaactgcgtcgcgagctcggcatagtccgtctctaggtcggattcacgccgcgcaacccgtgccacgatcttctccacatgtgataggtcttcgtccagcttatcagccttctctcgcacctcgataaagcgccggtccggcttgtgcactttagagaaggcgttcacaaatgaatcagtaaagttatcaaagatcccagtggccgcgccatcggacccggtatttgttgatacccgtgttgaatgtaggcgcatatgcgcattccaatcgggcgattccaagaagatagtgagaagaggcgcccgccgaagcacaggatgaagcgtcaaacgtttcaaaaatcgatgcagcgaccaagctcgtcgcgttgtgaactccggtccaaaacgatctcctcgcacatactccatcttgtgtttgtcggggagcggcggcaccgcgcatgccgggtattcgcgatagagcgtcttgtataggaagtaaaagtcggtgaagcgccgtcgaaccgtaaaatcgggcttctggaatgatttgaagtcggtctatatatgtcagtcatagtcattttgaggatatacagatgtcgggaggtttaggcagcagttgcaccactccccgacaatgtatgcaaagaaaaaagcatacatgtgtggtaaccaggtacgagatatatgcgtcttttgtcccgtcattttctttgagcggagaatcaacctggcattcgagaacgccatcgccgatgcccgccaggtcgacggcgtcggctagcgggccggcctgaggctcttcttgggcggagctcattctccgcttgccattggtgtcgtgatgaggttcactgggttctccagaatctgtacctgcagttgtcggccgcgaggtatcgctgtctgggtcgtgcttccaagacacactgtcaaagtcgtcatgttgatccatcgtgggggtgtcggtcggccgtggtcaaccggctgatagttgttgaaaccccagtgatgccgataaatcaatatttgcaggaaatgtttgatcaaggagtgatagggactgaaagggctagagatgtggagtggagggggaggtggaggttggagctaagttcaatgatcgccgttccccaaggcggagttccagaagcggaacgtcatcatcgcaatgaatgtcaataagagttgcttgctgcttgctacttggtcctttcgctttcttatacttatattattattctaagattcatcgagattgcttcatctgatatttatttgtagtatacacaacacgcttttggattcctgtcaactggggatatacagacagacctaggatcccaacccgtctattcctaacgaacgatcctctcaattcaacaatcaagtcaacatagcaatcgacaacaccgaacaagatgcaaaatgactatcgacattatattaaggttttggtagatgggggccaccgtgagacgttccatctccattgtctttttccgggatattggccaacccatcgcgatacggctgatcatcatcatcatcactgaacatttcctcgtcactctccccagcaaatgcattatacagctcaccgccacgacgctgtgttcgaccagatgctccagtcatcggttgcatctcatcttcatcctcaatcatttcaaactcgtagtcatcgtgagcagtggtgcgacgacgcttgaccctctgcagctggaagtagacacccaatccaatgaagaaggtaacgatcatggccatggatgcataaatccaaatctgtgtacgcttcgaagcaccgaaagtgggaagccaagaggatatgtagcctgatccggcggacgaagcagagggcgtttcagcctcattgctagtagtactcgtgggcagcttcacatcttcaattggcgtggggtttgtggttgttggctttggctttggctttgcgttcacaggccggtcatgatggtcatccgggttaggagctggggtctttgttggggccgccgtaacactagtcgtggctacaggagcatcctcgtaaggatggtcgtcgtcgtggtcatcgggcagggggtggagctcttgtttagctccatcggcggcctcaccccacagattgagtcgccaatcaatgaatgcgccggtgaattcattgacattggagtctttcacgatgatggaccaatcgccaataggtgattcacccctaagaataaattagcaaagcgtatatcatggaattggcagcaacacataccaatgagcaacagacatgaaagtccaatcctcatacccaaccggcatgacatccttttcgcgggcaacactcagatagctgatgattccagcggggctgcgcagctcaacgctgatgtcgccgcggcgggtgtgattggcattcatagtcacagtgacatgttccaatttagcgaagttggcctctttcaattgatcagcagttaccgtatagtgactgagcagaccccgatcaccctgggggatctcttggtgcactcgcagccatggcgagttgaaccacgcttgaggcttcacgagatcccaagtcttagcaagctggaccatggtatatgtatcgacctttccgaaaccccagtcgtggctgaacttgcggccagagggcaggttctgccagctaccgtcgtcttcgctcacggggaccgccgtctccaccatcaagtactgtaaatcacgccaggtcagctccgggcgtgcactgagcgcgagcgccacgctgcctgcggccagcggaccagccgcagaggtgccaccatgtccagcggagcactctcttgcaccgacgtcggtagtgtgaatataagcaccggagccgctactgtatgcgaccacaagttgggccgagcatgactcggagtaaggcgggtgattcccttcccggtctatggcaccgactgtaatactgtagatactgttggtatacccatcgaagttgcagttgtccccgtaggacgcaccgttaccggcggcaaagacatagacagagcctttaccccctctgcccttttggataccgttgaccatggcgcgcttgatcaagattccaggcgcatccatagtagcaccatcgtcgataggcccccatgaacatgaatatatgtcattcttctggtaggcgtagttaatagccgccgcttcatcgacatcatcgataggcttggacaagatccgaatgccggctatcttgctatcgtacgcaacaccgactccacaaacgtcgttctttgccgccgcgatctcgccgcagcatcgagtaccatgcttatcgtcaagcagaagagggcggggttcggggaggccctcgttgaaatcccaggagccctctggaaggtagttaggcttgaggtcatagctatccatgtccagcccatcgtcgacaactgcagtggccacgcccttgccggttatcccctccaaccacagtcctgtcacattgagatcgtgtccgggctgttttgtgttgataagatgccattgttctttgaagatcgggtcagtgatccctagagttgacatggcatccttccggaaagcaacggcctgcgcatcttccctcttgtccagcgatttatatggtacggagaccggcggaagtcgtttctgcaatcgttgtctcgctggagcaatcttatgcgaccacaggatcttgtctaaggggtcatcacttgacccgattgcgccggagcgccgccggagctttcgcctggtccgtaaatcattcaacaaggtgtcaaactgaggggtctgttcccgcggtaatgaaaaagtgtggtggccatccagttggccaatctggccctcgtggcgtgcgcctaggatctgtgcgatgtgggaaggagaggtggtatcgtcgagctggagggcgaagaagtcgcgggtttcttgagagcgagggtgtaggttcgcggacaccgcaccagcaagacctagggtggcggtgatgccgctgacaatgcgcatgatgaggaatcaattgttttcgaggaaagggatcaagggcgggttatgaggttcgaggtatctagcgggtggttgccatggacagttccggaccgttgaatagcaacttgagagttgtggtaaggggtgtactccgtagggtggacagaaaggaaataagctttaacaagaccctatttccaaggttcacaatagttggtaagaggaggttgtaacagcaagacacaatgttccaggcgaaataggaggatcgtcagaggtcacccacgcgaagtcctattgagtctccggaacggtctattgagctcgacttagttgatttggacaagaagctttttctttattaactaccagagaacgttcggggcgttctaaggccacggtttccactctgttctccgtattgcgtgagatattattatttagttacttgtctagttcccagtggatgtccgggctctaatttagcttacgtataggcacagccttggcccgccaggcatacgtagatagctaactaacaacactatccttactccatactggaattcatgactcgattgcttgatatttggatgctacggggattacggtgtatttcatcaataattcatatcaactgcagcaatcgaatagctcaagtccttgcatgagcaacatagatctattggctttcctctttcactttaaatctactgccgccttatgctaggtataattgagtacgccctgcgatcacataatagcctgatcccggactgagatgtacccagttactagactcacttaaagcggcacctgaaataggataaaacagaacatcgaggtacttatgtctacatgtatggagtatatggatggatagatggattttatgtgaaatgatcatgttataactgtgaaacatcgattcccagtatccagatacttacgttctatatgttcgtactcgcaaataggtatgtgggtaaccatagtaccgagtccccataccaaatttaagaattatgcttaattctttatttccattctatggtatttcacttttgaatatctcatatttaccctaacgtcttggaatcccgcatgaatattgcttttccaaggatccaagccctcgataaagctttcgtatgacagtggccccgcgcgaaggctggggataaccagccaccgggttatcggatgtatagaccttgctggtttatttttggctggctggacttgattgaaatctttcacttcttttcatcacattctctgccatcccattgatacccctatcctagtgtttatccgccttatagacaggccaacttccctgtcaccgccgcgtggacctatacccccgcccaacttggtttgttgcctgcgaatcagctcgggccatggtgtggtgaccctgcgttaggcatcagatccagtcgcattgaatccgttccatctattccaagaaaaatttcgacaaaagtcaagtccggcaattttccctaaatctgttcgaattgccttcgggaccgacattagcgatattcgttgcagttgggtttgcaattgcacatacttggcgctctatctacgctttttccagtcatttccttgagtttgggcgcaaatacacgacatcatggctactatggcaatgcgtcaatcgcctgatatggcaaacggcagctctaacccccagatttccaatggagcgcaaagagctccagcaaggcgcaatcgtcaaaagactccttctgcggaaagctccgaatacgaggcggaatatgataacccgaagacggcccagaccagtgggagcgatggccttgcgccaggacagggagacaagtctttctcggccagggcccgaaaccagcccgaggcaaacctgaactatacaacccgcaagccgattcctccatcgacaccagagttatcagagaaatcgtccacaccgcgaggtctttccacagagccctatcacccagaacccagtgcaaaaatgcctgagatccaggtccagtcaccaccacctgcaccagttgtgtcttcgcccccgactcggtccaacaccacacgttcgatctccgccaatgactcgcggccagactgggcatcagagcgatcacctcttcaaaagttggaggtaaccttaactggaatcagcaaggaagagaagcgagcacgagtacaacaggcagaaatcaaagcccgagagcgacttgcgcgcaagaaagccgaacaagagaaagccgaattagcggcatcattagcacgcgaagcatcaacacaacgtgcgcagccagaaagcgaaccatcccccggcgcagccagacggaatgaacagagagatattccaattggggatcgaaaagaggacggcatgcgaaatggacacgcagctacaccaccacaacagcgacaaccaagcatagctgtgcgtcacaatcggacagtttcagcaaatccccaatatcaatataaccgccgccccgaagaaccccaatatacacgcgcagaagctgccatcccactctcagctaagataggcaatgtgcctaggcgatcagtcacagtgagcggacctgccgcgaaaccagcacctgccaacaatatcagccacagtcgatcgatgtctcaagcgggtcctcgacctatgaaggcttccggtgctctaagagcggagacaacagacgaaatgttaacaccacctcgtgcgcaagatagcgccgagtcgcaagtcaggcccaagaaacaatctaaacagtctgtgtctttcaatgtcccgccgcctacgcccccgccaatctttgaatggaggaatgcacagcctgctaggcttgcggcccttgacttcgatatccagaattttgatgtggagcgcagcaaagcgtggtgggcaggtgccagtaacgaagatcgtagaaagagcagggctcttcctaagaactacaaatctcctgctcagaagctgacaggtaaggtcctccgttttctagttttcaagctagattttttgtcaccgaaatgcatttactaacgcccactaggaatgactgagcacaaaaatttccaaccccagctattcttgcgatgtggacctttgctacgatacacaggtatccagcgagctaggcttgatagagccagcggccccattgaaaaggatatatggcgaggatctatcatgatagtgactaaagattcccgctcctcctacgacactccacccacactgagactattctctcaaccgatggatcttcttcctcctccacccgtggagatcagccatgaagatggaatgcaactggctcctgaatatgtcgacccaacagctgggctcatgaaagtcggccgtgatgggcggcccctttacgtgagaccagtggaacatgtcgaggaacaagtcgacctatcgtttgtagagaacgacgatggcatctacgagctctcacctagcatggtcgactatactagtgaaggcatcaaacagcctatgacttccactcggatgccttccgtcgacggtgagatggcgagtttgtaccgagacattcctggagcccgtctgtacgccgatgccgcaagagatgtaacgttctggcgattcaacctagaggttgaactgagcacaacgcaacagcgaatcgcctatcggatcaaccagggacccgccctgggattctgggtgcccccagctggagaatccatgaacattatgtttcacagcggcaacgggttcagcccctctgtggactctgatcgagtctgcgggcccgatccgctttggcgagatattctcaatgagcatcagactcgtccgttccatgtaatgatcggtggaggcgatcaaatcttcaacgactcgggtatcacagagtcgccgttcttccaagaatggcttaggatgaaaaacgcagccgagagatatggggcgtcattcactcgcgagttccgagctgaattagagcagttctatctcgaccactatgctgcatggttctctcagggcctcttctcgttggcgaactctcaaatccccatggtcaacatgtggaatgatcatgaaatatttgaaggctttggttcttaccacgatgatttcatgcggacttctgttatctctggaattggaaagattgctttcaagtattacctgctgttccagcaccacagtgtccccgatgaaattgaggcagatgaacccagctggcttcttggtgctcatcctggtccatatattgagcagaaaagccggaacctgtttatgtctcttggtcaaggggtttcattgttgggtcttgactgccgcactgaacgacgggtatgttactccaatcttccgacttatggactatgctgacatgttgcagagcaatgaggttctcagcgaagagacctgtgatttattatgggaccgctgccacagggagatcatgaatggagagacaaaacatttgatcgttctttcaagtgtccctgttgcttacccccgagtggtatgtattctgattgcttctgtctttgatcgaacctaaaactaacgtcgaacccaggcaatgctccgcaatttcatgaacagccgcaagtcacttggcaaggctggagtacttggcgggcttgtcaatcgatctggcccaaatgtggaggtctttgatgaccattgggctggcaagcacctcaagtctgaacgcacatggttgattgaggatctccaggatctggccgcagagaaatcagtccggatcacaatactcaggtaagaccagaaaagtcgcttaacggcaacccaaattctaaacgataaaaactaacgaaatccttcagtggtgatgtccatctcgctgcaatcgggcagttctattcgaatcccaaattgaatatcgccaaagaccacgattaccgatacatgccgaatgtcatttcatctgctattgcagacattccggagaccgatcttattgcggatatgatcaacaagcggagtacgctccaccacatggactcgaacaccgacgaggatgtcgtccccatctttttccaggatgtgaatggcaaggctcgaaacaacaaacgattactacctcggcgaaactggtgttcgatccgtgagtataagcccggatctactccacctgatacacctgagtcagagataatagaggccccggaacctcggccaaataagctgcagcggacgttgtcgctgggtcgtggagaccagggatctaccgggaagcctggtattctcaggcgcctttccacccgtggaccacctcctacgaggactatgagcttcaatcgtggcgatgaagctactttcaatcgacgtgcaagcttggatgggcctactcagccccacgagaacggagacagctatttcccagggaccggagccgcgccacctccacgacccggcagcttccaccggcgaccaacaaatctcagccaaaaagcggcaaggaaagcggcgaagatgggagataacggcgcaggcgcctacatcaacctcgagggcgggctcgccatcactttgaacctcgagatcagtccacaagacccatctggggtcaccgcaccctacaaactgctcgtcccagcactacactacaacggaaccgagtacgacccgcccccagcgcagattgtcaagggctggagaaagttcctaccccgccgcaaaaagaacggggaagcaggtggacggcccgaagcagatgattacagtgacgacgaacaagacgactacgaggactacgaccttatcaataatacccgcgctaacgctgccactagccaacaacatcaaccacagtacgagggatatcctgggagtgaagaggaggatggagattctgagggcgaagtccctcaacgtccaccacggcaggttatggctgaacaatcccccagtcctgaggagcatagccgtccgcgaaagaagaagtggttcggcgtaatctaatgtactatattgataccattgtgttcttgatgttggctgtgacattttctttttgcgatctgatgattctatggatttctatgagtacgatagtattttttgtttgatgtatgattcccctaatgcagcgaggttcaaactgatatgtgatgttcattctatcaagacattccgagtaaagctgaagtatacaaaaatcgtcggctctccggtgtcttattaagcgattcgggccggggtgatctgacgggattacatcagcggtctcgacctctcacgtgatatgtgcttagaaagccccggacgatgttcaacagactcagccctgatttgcctcggaattgctcgaaatcgccttaaatcgcctagtttaaacgaattatctctaatctcgggtggtctggaaaccccagaaaggcacagaatccaatcgcatcctgtctgaggacccagtctctctgatctcattgtcggtttatcaatcaacttcatcacctaatcctggtctccactgcccctccgaaaaaagacattatatctccccctcctgtccccttcccctccacttcccatacacaccttcaagctgttttcctccgcctttcgtcgttttccctcccttcgatccattggattgactgccgctgcggccactaccgtccaccaacagtctcctccttcggcctcggtcttcactaagtcgtttccgacgccgttgcgcgtcaatcctaacaccgccagaatggtgcactctaaagtagtcagtaagtagtctttggagtggatcgaatggtcctgatcatcttaatccctctgataccagagttctaacctcatatcccccacagttatcggctccggccctggtgctcacactgccgctatctatctttcacgcgcagagctccagccagtcctctacgagggcatgctcgccaacggcactgccgccggtggtcagctcacgaccaccactgacgtcgagaacttccccggattccccaacggcatcggcggcgccgagctgatggacaacatgcgcgcgcagtccgagcgcttcggcaccgagatcatcaccgagaccatctccaagcttgacctctcctcccggcccttcaagatgtggaccgagtggaacgacgacgagggcagcgagcccgtccgcaccgccgacgccgtcatcattgccacaggcgccaacgcccgccgtctgaacctccccggcgaggagaccttctggcagaacggagtcagtgcctgtgccgtctgcgacggcgccgtgcccattttccgcaacaagcccctctacgtcattggcggtggtgactccgccgccgaggaggctatgttcctggccaagtacggcagcagcgtgaccgttctcgttcgcagggacaagctgcgtgcctccaaggtcatggccgaccgtctccttgcccaccccaagtgcaaggtccgcttcaactccgtcgccactgagattatcggtgaggacaagcctaatggtctcatgacccacctccgagtcaaggacgttgtctccaacaaggaggaggttgttgatgccaacggtctcttctacgctgttggtcacgatcccgccaacgccctcgtcaagggccaggttgagctcgatgacgagggttatatcatcaccaagcccggcaccagcttcaccaacatcgagggtgtcttcgcctgcggtgatgttcaggataagcgttaccgccaggctatcaccagtgccggtatgttcagaccccggttcgtccattataagtttatctcgctaactcaattttctacaggatctggctgtgtcgccgccctagaggccgagaagttcctctctgagactgagtctctcgaggacgcaaagcccgtgctctaaatacatatatacacctcttcccacaccttcctctcccatttctcgttgtcatgatacatgaacacatgatgtttggcccgtgtatcgagcactcttcttgcttctagacttatattttaggcgatatctcatttctaaattccccgtgcatatttcgattgggttccttgcgtctttttctctctttcttgttccctttctgttgcccacgtctcatggaagaggaaaccaagtggtctttgtggttttacatcagttggtctgcttaggctgcttatacccttagaaatagaatagaagaaaagcgaggctcctatgtcatcctcgataaaaagaactcagaagggaatttcgttccttcccatcatacaagccttattaggaactctattcccatgcaccgggtagtctataagttacgagtttggaagctcttttatcagattctcttaaatgtctagataagcaagatcatttgaattaaaactgccgaattaaaactgccgtttatgatatgtatcaatatggctgaaacgatactcatcacaaaagtctctccagagacaaattaccctcttcccttaaccgccgtctacgcagataacccacctaacgccgtaaaaaacgaatgagtcctcatttctcagacttcacaggcacagcagctgtgaatgcagtagcaagcacaggcaccgatgactcattttcagcaaggtagtccggcataacccaatcagcaaacggattctccgcgcaccagcgatccttgacgacaaaggtctttcgctcccactcggcaatgtcgaccttccacttatcccacgcctcggcattagctcggcggttaacctccgtctggtcgaggtagggctttttatcggctggcgttgcagtgcgccacatctggcctagcgcagcgcggatttcgtcgcgcggagccttggcgttggggttgttggatgctgcgcggcggacttcgtcgcattggtcgcggcagcgcgcccagtagtccttttggtagaagaggaaagggtttaggcctgattttgcggggcgtggtggtgcggaaccgagctcggcgtagatggttgtccagagggcttggtcgtaggcgtcgcggcgggacttttcggttgaggttggtttgcgggaggtggaggttgaggggggctttggtgggttgatggttgggcttgaggtggaggagagggatgagctgcctcttgttcttttcttgatggttgagccgtttggcgtggaggatttgcttcgggttacttttgacttttccgggacaagtgggtgaggcattgtgatggggccggatatcggctcgattatttctgatgctgcgcgaaggcctgagaggtatgctccgtggacggttgctgggtgagtgccgcaggtggcttcaccggcgaaatggaggtttccgattggccgggccatcaggtcgtagtcgtctgggaaggctgctgcggccacgtaggagtagctgccatatgtgaatgggtcctggccccaacgggtgatgatggtctctagaggaccgggaactttagtgtctttgaagacgtttcgaagttggccagtgacctccgtaattatttcttcgtctgatgtagattctgcttggtgggctgcgtcaccagccatgagggcaattaagcatgggagtccggtagtcttcatgacattccagaacagatagaatcgaccgcggtttgccgcgtaatcttcttgaaccatagaagcagcgttattcggctcacggagtaggccaaacatatctcgcttggtgtcccagaacggctcttcgaacactaaaatgaccttgttcattattccgaaccccagtcggtcaattgcgccacgcttccagtccggaagaggaggctcgaacttgattttctgctgcttcaggacaccgagggaaccggtgaaaacgacatgatctgccaggaacttttctccaccctcgcactggacaactgccttctgtttcttgttggacccagtcgtatcgtaagagatctcggtcacaatcttgccggtacggacatcgagcttttctggcagcatatacagcccgtagggtaattgctggtagccaccaatgacctgggaatgttcaccctcgaactcgtttccgatgtcctggtcccatcccgacaggctaagtctgttcacgttggatgcattcgcgtactcgagattggcgaaatgccaattcatcaaccgcatatccttggttgtcaccggaagcatgttttgatattgtttgacaccctcgtccataactgcaccgagagtctgcgcctgggatgccatggcaatctcgtccagttcaatggtgtcattgactgtgtatcctgggttaagcttccatccagttgcctggcaggtcaaggctgccgggtcatcttccgaatttcccgctagatcgctcgccacatcgacggatggttcattttcggcagtcttgtgctttattccccgtctaactcgctttgtggggaccaataaatctattgtcccagctgccctcgcctcttcatactgtcgcacagtaagtccgtcatccaccgctgattcgcggccagtgtcaatcaactcgcggtttccctgggcggttggcacaatctgagctttgtgacgatagaatccggttcggtcgagcaaatcattgtacagcttttctgccatcgcgtcctgaacctcattcacgggcgatccatcgatatcgtaaatcgtcgaaacatcccgtatcttgtgatagtgaagtgccagctggccacgaactatctggtctagcgggttgccatgatcgaagccgacaatgatctgagcacccatttctgcctttgggacaagcccatcaggcagggtttccgacttgagactgtgcaacgggtgtgaataaatgcgtccaccgactcttcgacgtccctcgagaacaacgactcggggcatggcatttgaatcacggtactggcggaaaagactctccagttgacgtgcacaccccagaccagccattccagcaccgattacaacaattgtaggtccttcttttcgtcttccgcgtttgggtttcactggggccaatggagcctccacgcagccgtgattgatgtagccatttcgcgcgagccagtcgtaagcaaacgaagccagattcatccatcggtaatctttggcacatccgagtgcttcttccctgctgacagctaccatgggatttctcccccagagaagcagtattccatttcgtatgttgaggtagattgtgacgtgaacgtggcaaagatggtcttgcagaaattcttgttcttgtcgatgaagagcatacgggttcagccgtgatgcatacgccgctccaacacactgctcgccgtaaacagaggggtgaattttagatgggatggacgatctcggtcgacatttggacagatcaactttcccactctccaaaacattcggtccaaagacaactgaaggcatagaaagagactgtacgggcttgggtggaggtgatgtagatgcttttagctcaaaggaagatgtcaagtcagttgaggttgtcgactcattcggagtaccgctactgccactggcatacagtctctccgttgtgccaacaatgtgggatccatcagacaggaagctatgcgacttggcgttgttgttccctagatttcccaaggcaattgatgccgaagccgcttcatatgccttgtgcgtgatgcgtagtcgcttcgcaggaggttcagatatttcggtcggttcagatagaagatttccttgaccttgtaacgtgatctcgtgatttggaacatattgattcatgtatgaatcttgacctgggggaattccggcctggaatctcatggacgttgcgccatacatgttgatagcgagtatctgcagacaaatcctcaaaggagggtgttgatgatgatagaaaaagaaaagaaagacacttccacgtgcaagaagacgtagttatggactcgaagatgtgatgtcgacagtccttctaccccgagagtgtgtggatatcaaatatgcaggcgttcgcccatgacatggtcataggaattcgagctgtggcaagccgaaggaacacagtctgaatgaatggatcaactgtattatgttagatgagatgtgatatggttcaaaatgaccagggtatgagagagtagaccgaggcagcacggatatcaggacatacatcgagttcatcccccacaaaaaaccctcccaaagaattgagaataaggcccatcaaacagggcacgaatattgttttggaacaaactaaacgaattgtaattgtaattggattgcgaaacttgaggaagagacagtgagaggaccagagtagaaaaacccttgtggcttgattcctcggagcggggcgtatttctcagtccggcaggttgcggcacccaagttcgtcaacgtccaagggctgcgctctctatgttcttcactttaggatcaatccaggggctacttgattttcatttggttatctaggtttcaacatgagtgtgcagaccataggcaccatcctcccctgcgaacccgtccgagtcattatcggtgaactcatcgtgatatgatctcctgttcgagttttcccagcccggctggtcattgtcactgtcgtcacccaaaatcaggtcaacattgtcgtcgtccagatcagtgaatcccattcgctcttcttcgtctctcgcaattgtgagagaggctttgtttacatcaggatcttctgaaaacccatgatgagggcggtgcgctgcatgatcagcttgaagcgaatctcggatatctgcacgctcttgggcttcgagctcctttgcgcgggccaaagttctaaaaaatagagaagagaaggatcagcatgagtgcacaaaatatttacgaccgatgaatttggggctcaaacctttggtatatataccacccggtgaagattccaataccgattgtaaggataatactgcagatattcacggccttggatcccgcactcatctcctcgcccttttcggagagcagacgtatccgactaccgatgaacgcaggaaccaacaatttgggagagatgatggctgtggcaagtccgtacatcaacggctgcaccgtaggaaatgtggacacagctccgttgcagatcgagtagggcagcgggcataaacggatcatacaaagaagtttgaggccatcatatttcaatgtcagggccaatgcggcgaatcgcttgtcatgttccataagacgtttgacgaatccagacagaattgtccgcgaaacataaaacgagacagtcgagccaagaattgttgcggaagcgtaaatcaaccatctatagaagaaatctcgagttagcaatatattcacttttttttttgataagagcaacatgaatcagtctcttaccctttccatataccaaatataaaaccagccacagtcccaaatgttgaccaacccacaagaggtggaaatgagacaaaaaagacacatagccacaggatcaaggcggcgagccaggatgtttcccacgtctcagcgaccgggccaagccagatgaacagcttccccgttaacaccaagaacgcgatcccggatagacccaggaatatagcagcgaagcaagccccgatttttttccatagactcatcccctcccatatcttattcatacggacatataactctgtgccgcgctggattatctgttcgcgatagcttgcaccctgcccgctcgatctgccggtgtttagcctaccggcgcgactccagggcggatgaacatcactatcaggagaagaaggtatagggatcgggggagatggtgagagagatagcgccctggcggtggacaggtagtccgcgggcattgtgaaatgtataatcctggggtatcaatgctcggcagaggatggtcgaatccggggaagatgaaccactgtaaaacagggaccgacaggaagtgcgataccagggtcgatagaatatccaaagaagtttcaagggcgtgtcaaggccctgatagttggaccggacatggaggatgagccaagcacttttaggctgaaaatcaatttgactctgtcagcggatcccgccggacttgagctcgggtggtgattgatctacatgttgtctatgttgtagggctatcgttcagttattttgtgctatttatactataagatacatatctaactctattttgtagttatgtctttgtatctatctatgtccatatcagggattgttgattctgtaagagtgtagttagcccctaggtatgtgaagcttgttattttatctacctatctctgtaatgctatatttcctttagcactcacatatcttatccttactatattattgtgttgttatattacccaaacaggccgactggaggtagttggagctaagtcgataagctgttgtgccccagtgttgatctccttctccgcctcccccctctttgtcacttcaccctttattcaactctcattcacaaacgtcggtcggcggcgatgcgatgtaattatctgcttgtcatctatcactctcgcaactctcatcaccttgagctataaccttgaaatcaaccttggaacccctgttgttcttcactttcttttcccatcacctggcatagacagaaagcatgaggtacctctgattctcgactcgtcttactttcgtcaagcatattcgtgcctatacctctaggcttcggacatccttttaagacccaatcccttcaacgctaaggtgttttcccgcttatcccggtccctttcctctacacgtattacacatatcggaatacaccatggtttccgacgagcttcttgaagaatgcctccagatcctgcaggatcaggcactggatgaggaggaacaggtggagaaggtggaggacttcttgcgtgccaatacatcattggcagggacacccttggagaatgcggtgctggacatcctctggcgccatcgcaatcgaaacttgccagacgcatcacctccagtccgtcatactgtgattcgccgctcatcgcctgcgccatggcagatggctcgatcatctacaccgctatcccctcattcaactttggggacaagccctggaagtacctcgtggatgcaaagctcccgtgggccgttctcgcggcctccgctatcttctactgcctccccatttgggtctccacgcccatcgccccggctcgcccttgcacaacctatccctcattccccaaatctgaatgcctacgagttctcggaccaaagccagatctctgactactatggagaccttgggggcgataacaatgttgactggctagtcgcagatgatgccaacagtacaacctcatccacgggtggtgtcagcactcccggggcactcagcgccactgcagttgaatttgttccggatatgagcccacatgatatcctgcgcacggtgctgggtgacaagcgatcaaacgatgaaatagaagctgcactggaggctaacagttatgatctcggtgccaccatcgcttcgttctcgcaggatatagaatccgaggcgatctcaaagcaacacgatgacggtcgtgtcttggttggcaagtctatgacaatagaacaaatacgcccggtcacaccattgggtagcagtcgcagccccgtggtctgtaagtactggctatccacgggacaatgccttcgagcggattgccgtttcagccatgacctaaacacacatgtgtgcaagtgagtgttttttgaaatctgggtaagtcaatcgttctagcgctaactattgtgaacaggtactgggttatgggaaattgtctagctggcgatggatgtcccttctcgcacgatccttcggcgcttatcggaaatctcagtgtcacggatagtagtcgaccagcttcgccctccccgttccaggtagacagtggttctgacgcattcccacccctgcaagtggcagataacggtgatcaatgggcaaatcaatacacgggccgataccctggccatctttctgcttatcaacccagcaaatatgcgcctcctggcctccatcctggaatgggcaaaagaagtggaagtgcaactcatctcggacgccccagctcccgtccatcaagccgtcaccagaatcgggagttgaatcctgctgcaccgtctgtagacgatccagatgccttcccaactcttgccgcagtcaatgctaagaatgctgggaaaaagcatcatgggaaacggggcggccataacaaccgcgaaactggctcaggaaaagaaaataccccttcgtctctggcggatgtggttcgaatgaccccatctcctgtccccgggaaaaccaaatctggctccagaaacaaagatacgaagggtcgcgagaacagtgccgcagctcagtcgattccacccccgcaaaatattccgtggttagagacaggctcgcgggcgaatcaacaatatatcaaatatcggacagaggctattcgccacggtactgtgcgaaacaagttcctccagaggtaagctttcagcgagtaatatgatccccactccttctaacgatatatctcccagcgctgcccaagcatggaaccgcaacgatgcccgagctgccaaagcattgtcgttacgcggtcaggccgagaacgacgcgatgcgcaggtgtcatcgggaggctgcacgccagctctacgaagaacgtaatcagcatctctctcacaagggattggatgaatcctcagaagagctttacgttgaccttcacggtctccacccagaagaggctatcgaatatctcgagaagatcctgctcaagcatgctcgagaaggcctccgggtggtgtatgccatcacaggcactggtcaccactcgaagaacggcaaagataaaatcggcaaggccgttaaagcatggctgaacgagtggcggtacttgtttcgggaattcagtgtacctggtgagcgaggaggttatgtcggagggattctcggcatcgatccaaccagttatgacaagtcagtagccaaggagctggctagcgaattgatggaggccaacgctggcggagagcctcccatcctaaccctgggcaaaatccagttactcaagcgcgaagaaatagagactcaagatcaatgacctggcgtgtcattcaactcaagataccccagtaccaatctatctattgaatctaagttgtatagaaaagtcgtctgcacaaattgagccttttcgcccaaatttgtgactcaaccacaagacgcagcagatgcatcaagcgaacacgtcgggttcttcaagcaatatttttaggacagattcttcctggctgcatgcttctatatactagcaaggctacggaatacaatacacagtagaaaaaggctcttctccagtagatgcactcatataacatactagaaggtacaaggaacatgcaaggatatatgcctagataatacacagcgctacatatataaatcatctactctggttcctgatgctgccactccttcctcaaagcatcaacatcaaccccacaagcctcagcctttttgacaatagccctagccttattggcaacaggaacatcaatcatcttcccatcaagagtccaagcacccctccccgccctcgcagccttatcatccgcaataacaacccgcatagcccactcagtctcatgcggatctggcccaaagatctgatccgcaaccttcacttgcgaaggatgaatacactgcttcccattgaaccccaaccggcgcccatccagacactcttcctgtagcacagctggcggcgacccatcccccttctcagacctgtacgccgtgcagacaaggtcaatcgttgacggtagctccgccgcccgcgcagcggtggctatcgcacatcgcgcgaacagaaactctgtgagcgagggcgtccgcgtgatgctcaggtctagggcgaagtcttcggctgcgaagattaagccttggagcaagggcgaagcagtgcagatctgggataggtttgtcagggacttggcggactcgactagagccaggagtgagattggggttcttgttccttctgttggtggttgctgggatagagtgtgggttatgacgtctgtgacgaatgttaggtcggaggcagagttgacttttgggattacgattgttgttaggtttggtgattggagctgggacggttagcaagttgaatgttaccagggtggtggaagggggtgggagctatgtgtgtgtgtgtgtgtgtgttctggagtccactcacgacttcggtcaaatcacccaatgcgagtccgctgtctacggaattgattcgcacggcgcgttcccggattcctggtggcgcggcttggtcaattgctctccgcactagcgagcgcgcctctgctttcatgtgcggagtcacgctgtcttccaggtcgtaggtgacgcagtcggcggtcagtgagcgcgacttatctagaaagcgttgggaggagccggggactgttgggcgttgttggttagctctggggtttttcttttggagttcggggtgaaatgcggggaagacctcgggatgcgatgcggctttggaagagagctcgagcttaccgtagaggagggaacgacgcagagtatttcgggctgccattgtcgatatggtgatttgtgtgtgtatccaatgatatagagttgtgtactgttattcttggagagtggaggttgaggtctttatggggttgactcgggaagaagccgactcggttatccgtaaagccgctttgggagaaggttagcaaagttgttttctccttatatttctttttcatgacctgatacaacttatgagatgtctggtagtagctcttcttactatgctaacaagcagttcatttaaatcagagaactcaggcataagtactctgtagcgaagctcgatttagatatatatacttgcaagtaaacgtattttctgtatattccagatttcaacttcgtgtcattaggtgtccaagtcccattcatctagcgctgtatttctagagtatatcgcaggcagcatccaacaaacatataacgctagtattacacaaatgtgctgaacatcagaggtactctagaaaaaggagtctggagcggatgcacacaacaaagatcaattcacctttgaagaataccatattaaggaggaggaacatattgtaggtgagatcaaagagtcactagtgagtgccaccaaaacataattatagtaaaatgttttcctaactctcgcctataataaggtaatctagatggtacttgaatcacccgaaaactactacatacatacttatgtacttcatactctgcatgtatgggtattgctatgtgccttttgaactactttggcctccttgtgattttgatgcagaggttctatactccgtatagatcagtgtcttatcggtttagcgccacatacgttggacataacgtgtggctgactggtatccactcagcatagtcacgtgaatacctttagaaattgtcccgaagcaggagtaatgatcggatcttcttatagatcttctttaacaattctaaaataacttcacagtatgctaggatagatcatgcagctctagctaagtaaatatcacacatcatcaacgaatatacttaaggttggtctatgcttccgattattctgccatcagaaaccgcctatacccgtgtttcgaccacatagggaacatcgccggtcaacaacaggcttaacttggattaaattgacccaatctgctgaccgagaggtcctttacattcataccatatcaaacccctgccctgtgaatcatggaccaaggacaaggaggccaaggcgagctcaactggcgcctcagcgcgcacccgatcacgctacttgtcttcttaagtattcggatcggtccgtattcccccaccccgagtaaaagcagcaagaatgatttggctaacttcatgattaggcgcgctactgatgtatctatttggtgtactcttcatcaacaacttgtacggaacctgcgaactacccgcctgtcaacctgcgatgctaacgttcatgtagtatcctcgtcttcattttcacccttctcctcctctccgcggatttctattacctcaaaaacatcgcgggacgccggctggtcggcctacgttggtggaacgaggtcgacacctcaaccggcgactcacagtgggtcttcgaatcagccgaccctaacgttcgcactataaccgccaccgacaagcggttcttctggctgagcttatatgtcacaccagctctgtgggtagcccttgccatattggctattgtgagacttgtcggtgtcatttggcttagtttgattggtaagttactcccaagatactttgatatatgccggcagtagatattgactttggtttagttattgcactcatcttgactatcacgaataccatggccttctctcgctgtgataaatttggtcaggcctcgacatatgccaactcggctctgggtggtggtattgtgaacaacatcgctggtggcctgctgggcaggctattccggtaatggtaggcaggttgatgcctgtcttgccgttagtggccctacattgtcatccctcttgtatgtgctctgtatttctagcaggatatttgaccacttagcattcaaatgcatcaatttctttcaaaatatggtctcatttgtagctctaatgtgattgaaaacccggtctaatgtaagtgctttatctctagagccgttgcctcaggtaggtcaacgcatcactctttcctcaaacacgcagtttccaccgcagcggcacctgccgattgccctttgttttccttttcctcctcttccctcttcatctccctcttcttcttcctcttcctcttctccattgacttcaatcatcgtcaacaaacagcctttgcgtctactgcgcttcaaaccccacgttggtaagtgtcgttcttagtgttgaccttgcaccatctctctcgatgaccctaggagagcgaatcagatgaaaatatcgtgcttcaattcttttatgtgtcttgtcccatctgcctttgccttctctcacccctccctagccctccatccatccattttttaacttacgcgctcctaaccattaccccagtgaaggatacttcacgacgacagactgttctggggaatttgactaacgagcctgtgtatcaagttgaccaaaatggagacaaatatccatgaagaccggaatgaagattttacctgcggacagtgagttctcccctccaaaattctagctttcaaggcttaggatatccccccgagaaaatcagtcacttaaaaattctagatgcggtggatctggccatatgactcgtcagtgcccgaatgcctctcttcctctgagacagagagacagcaatgcagggtaagttggtcctacactttccatgtcacattctgccagtccatctaaccaatgctaagatatagtgatgcctatggcaactacggcaacgacaatggtggaggacatggtgattactccggtggtggcggtgaccgcgcttgctacaactgcggccaagaagggtaagtcgttgatatctgtgtacttgccaaattttactgacaacaatgcagccatagcaaagccgactgtaccgagcctcgcaagatgggggcatgcttcaactgtggcgaagaagggtgagtaactgctgggcgttttatactttagtttgctaattggctccaaatacagtcactccaagtccgaatgtcctaagcctcgcgtgttcaggggtacctgccgtatctgcgaaaaggaaggccacccagcggttgattgtcctgagagaccccccgatgtttgcaagaactgccaggcccaaggccacaagacgatggagtgcaaggagaatcgcaagttcgatctcaaccttgttgctgacatgctaccccaagaaggttgggctgcaatgaagaaagccagtgacgaaagggatcttgatgatttccgagaggtaccaaaaatccatacgtaccttgaaagtttcgaactttggctgacctaactccaggcacttaaaatctactccaaggcagtccccaatgccacctgggcagacattgagaagaagatgcgagaggataatttcaacatctacatcattgctatggtaatcaatcatcatcgttctgatacttggggatgaatcgctaatgaatgaattttaattataggaggctgaagttgacgatgtcatgagccttatcgatcttcagggagtacttgaccgtgagtacgtgattggattctttttcaaccccaaggcgtcgcgtggccacctccgagatcgttggcctgcagatgccgaggagaacctagagcgcatgaagagcgccggtattccctacgagcgcaaggtgcctaagtgcctgaactgtggaggtaagtgtttactttgaagattccttataatattgctaaattctgtttagagttgggacatatctcccgcagttgcaaggaggagcgcgccgagggcaatgatcgtgtggaaatcaagtgctcaaactgtgagggagctggacaccgcgtacgcgattgcagacagcagcgcaagcacaagcatggttgccgtaactgcgggtatgtggctgtggtgcaaacaacgaactggataatgctgacttttatgaagatctattgagcatattgcttctgactgcaccgagccccgatctgcggctggtgttgaatgccggagatgcaacgaaagtaagaccttgcccaagatgattcaaatatttcatgatgctaatgtatctatttcagctggccactttgccaaagattgccccactgttgctgaccgtggccctcgcacctgccgcaattgcgggtatgttaaaatatcatagcccctgcgattgtcgctgattctaacatcaatacagatccgaagaccacatcgctcgcgattgtgatcaacctcgtgacgtttccactgttacctgccgcaactgcgaaaagagtaagtgcgatgcatgccccaaagattcctggaaacacaactgacaactgctattttagccggacattactctcgtgattgtgatcagccgaaagattggtcgaaggttcagtgcaagaactgcggagaaagtgagttgatacatgcgtttttaatactgagttagtccgctaacaatccttagtgggtcacactgttgtccgttgccgccagccgcctaaggaggaagagcctcaagacgaacctactttctcccccggctctcccaagcgcgaggaacctgatccgctgaactcagaggctactgaccaacagtttgaatacaagcgccatgacgacgaggacctctggtaaaagacacaattctatgccagaatggggtgactggaaagctctaaaaacaatagcgatttggtttccctttatgccctgttatgatcggccccgtatgagagttgtcgggtgttgactgttcttgggatgcttcacggtggcctaagatggacaagaatctgatgttacatatggggtctatctttgctgctctctttttttcaaatctcgcgatgtgttttgatgtttgccaggatttcacccatgagtttacgatgattgctgaccggccgatggtcccaaaggaggatatctgttaagacttttcatgctctgttgagctcgatttgatttgacgcgcctccggatgaatctgaggatggagggtctgggcaggaggctctgatctggggacatttctgacgtgcattgttatctgacaagttcaatttcaagggaacatccatttagtgcattcttcttgactcattgtagactgcctagtaagatcgtttgaagttgaatgctacaggagtaagtgaatgacggcaccagctgtaaagtgaaccggaaaaaaacaaaaccttgcgcaataattccgactcgtatcatactcggagttcctcagttcggatcaaattcccgaggtcggctttacttggagtgccctatgccatgatttccgatgtcaaaccacattaaccttcgaagcaaattcccgtcgatcattgactgttacctcctagtcgatcgtcgttttactacagcacgttgttaggagttgtatttaccacgtcattaccgggttgatgtatcgtaggccgaatccgggattccggtgccctaactggctcactctatctacttggattagcaagttttggcttttcttggaatattgtgttgaatagttaataaagattactattgtcactctatttacttaacattttaaagtgatcgactgcataattgggtagtatcacgtaaatacagagttgcagttaggcatatccgaatcgggcatcccgtactctcggctaccccgtgattcggcctgtgccgagctatagatttttgtgtgacaaagaggaaggactctgaaatccacatgcgtaggatcaaaccacctacctattttggacattgtaaattcacctacctcgcctagtagttgggtgctaattgccgatgatgtcattaccggcttcggctatagccggtttgacgagcaggtttttcgggacctgaggccggtccgatgtgaggctaacacggaaagttcgtgaccccttgtcaccatccctgccaagtgtgcttggcgagtcaacggtgaagagaagataaaaatcgagtagtgagcgcaaggtaggaagcagtaattgcgcgcagtggtttgagcccaatttcgtgtccacagcaatatgtcttgtgcacatacgcccgtagtcctttcagcggcgatcagcggagaaaaaaaaatggggagtccgggggaactggagaatctccaggtttccgtcaaatgcaaccccaattgagtcccaacaatgtcaaaagtaccccgaaccacgcgagagcctgtgaaccgtgcagctgtcatacacttcatatcatcgacggaaacagaccgtccatgagtccatcggtgctgtcgagggctagaactgatgcaatcacaaatattaccgtattaagacagtactgtcaccgataccggacggagaccgacttgggccaccnnnnnnnnnnnnnnnnnnnnnnnnnnnnnnnnnnnnnnnnnnnnnnnnnnnnnnnnnnnnnnnnnnnnnnnnnnnnnnnnnnnnnnnnnnnnnnnnnnnnnnnnnnnnnnnnnnnnnnnnnnnnnnnnnnnnnnnnnnnnnnnnnnnnnnnnnnnnnnnnnnnnnnnnnnnnnnnnnnnnnnnnnnnnnnacttggccatgcgagggggctcgcatggccaactacgtgctcctcctgacgccgaattgccaggtggatcctttcgaaacctggaggcataccgatgatcacccactctctcgtctcggctgtcaagatgtggtatagtggctcgctcccccccgatcaggccatggtgtaggcatcgccaatgcaacgttgctactgcttctcattggcggcttgtctcttgctggttctgacttgatattagatgtggatactccccttgtttgactgcgaagttcataacctgactggtttccccggacctggctgtttcgttgttgaatctccttttctctgcctagctgcagtctgtccatttcaaatccattgaccccggcgaatagtcttccattctaggaattgactataagtctgtctttcttctgtaccctacaacctatacaccatatccgccatcatgaaaccatactttggccttcggggcacgaacctgaatatcatgatcggtgttattgccggtcttgatttcttgtatgttggtctttccattatctacttttgaagtatcactaacgcgaattacacaggctatttggatatgaccagtatgtcatcgcgaactgaacgtgcgaagtcttgtggtccttgtgctaacactcaacagaggtgttatgggaggtctattgacattgaactcatttgttaaggtcttccctgaaatcgacaccactaaatcgagttcatcgacgggcagcaacgcgactacacagggtatgcaattcatgacatctctcaattcattcatatactaattccgcaggaataaccatcgcttcttataacttgggctgtttctgcggtgcaatcctctgtatctggattggaaactaccttggccgtcgtaagaccatcttcgccggctctatcatcatggtgatcggggctacgctacagtcctgtgcttactcgctgccgcatctcgttgtcggccgtattgttactggtatcggtaacggcatgaatacctctaccgttcctacatggcagtctggtaaggagtcagctctgttgagaggagcccgatgctaatattacctagaatgctccaaggcccaccaccgcggaaaactcgtcatgctagagggttccttgattgctgctggaatcatgatcagttactggcttgactttggtttctccttccttgatcctagctccgttgcgtggcgcttcccaattgccttccagaacgtcttcgcattggtcatcttactcttcgttctaccactccccgaatcccctcgctggctcatcctgaagggccgcgaacaggaagctttgcaggttctctccgcgatcctcgatttggatgagaacgatgcctacgtacactcggagttctctgccattaaggatgccgtcctggctgcctcaagtgtcagcttccgtgacttgctcaccatggatgagaaccgccacttccaccgtgttgtactcgcctacgttaaccagatgttccagcagatctctggtattaacctgatcacctactacgctgctactatttatgagaactcacttggaatggatggcctgacatcgcgcattctcgccgcctgcaacggcactgaatatttcttggcgtctttggtccctatcttcattattgagaagatgggccgaagaatcatgatgttgatcggtgcggctggtatgtcgatttcaatggctgttttggctattaccactagctttgagggccagtccaagcctggtattgccgctgctgtattcctgttcgtcttcaatacattctttgcctttggctggctgggaatgacctggctatatcccgctgagattgtaaggctctcatctcttttattcctttacactaaaacaccactaacaacgcgataggtgcctctacgaatccgtgctcctgccaacgcactcgcaacctcgggcaactggatcttcaacttcatggtcgtcatggtcacgcctgtggcattcgacacaatcaagtacaagacatatattatctttgctgtcatgtgagtatattctgcgcggaatgcattagtgcacgactaactcggctcctattagcaatgcgttcatcttccccgtcgtctacttcttctaccctgaaactgcctatcgatccctggaggagatggacacaatcttccataagacatccaacgtcttcaatgtcgtctcggtcgcccggaacgaaccccaccgttacggaaagaacggcgagcttctcatcaactacgaggacaccgcggagcacctgcgtcgtgctagctatgtctcagagaagaagattaagctggctagtgggatggatgatatggagtctggaaagggtacccatgttgagcaccgccaggacagctcgtctgattaaattttagagaaggcattcttcttatgttaattatttacaatgataatcaacgattcacgattcggtgcatcaaatatttcatataaccctcatgtaggtcaaaaggtatcaacgacagaactcagccacaaatgccccattcaacctcacgctgaatcacaacgtgccatggccgctcacagcccaaaggccaatccaccaatcgcagcagctaggacagcagccaggatgccagtcccactgacacccacacttgctgcagaacctactttcatgattggaccagctgcaacccctccatctgttgaaccagacgaggtagtagccgtagcagtgacagccgaccacaacgtgacaggctctgtcgagctcttaagggaagtcgccgagaaaggagtcgtgaacgagtaacgagacgacttgctgctaagcgaagacgtcgcctcggcactgtttgtcgcataaacagaccagactgtgtaagtactcgtagttgtagaagtgaccgtctgaacagtgtatggggaataagaagtccagtaatagaaccaataagtcctatactacaatcagcaaagcatccacaaaccaaaaaccaacataatcagaccacataccagtagacagtcgtataataataatcccaatcaaccgcaacataacccgcagtagcagtagtagtagcagtagcagtctcaacctccgtcgccgtaagcgtagccccagccgcaaccccatcatactccccagcacaacccgtcagcgcacagcaaaccttctctcccctgtagatccgacacgtcctcccgacccgacagtagtaacccccggaacagcactgcgcaccgagcggcgcacaccccgtcgtcccgcagcacttatacccgagcggacacgtcccgccaccagcgcagcacgtgtcgcctatcgaggcacagtacccgttcccgcagcacttcccgccgatccgacagcagcggcttgtgtcgtatgcgcattcgctgtacccgattttgcattccagggcgcgtgtattcagggttgagttctcgccggagaggactaggggaagggagaagatatcatctgcatcgaaggagatggagatgttggagaggagttggggctcgtcttgatcggtgggtgtgctggctgctatgttggcaaggaggagggatagggctaggcatgtaaaggaagggaagaagattggggagagcatcttggagaaagaaagcttggtggcttggttatggtgtactgctctgttggaaatgtcggggtggaactgcgattttaagtcgcttcccctgggcactgcctacatcaatgcggctggataaaagataaatatgcccaagcgagcatgtttaagattgttgttcgtattcacgggaatttttgggccatattacctataagggttgggttgttatgtttgcaaatacgaggtgtgtcgcttggcgcgggctcgagccgctttttcttggttgatttacggggtgctcgctgtatgggaccgagaagaggggagccgaaactgcgctagatagtttggcttgctcctaggcttttttctcgttgataacgttgatgtaaaggtctggaggtgttcttggctttagggcttagcgatcctcgtgatagtgctccatttggttaggtcagattctcatgcagtgtttctttgtcaagatgagaatcagactagcaattgatttggtttgtattcgattccgagaaacacacggtcttgttgtagagttcgagctctatccttggacagggtcgacgttgtgaagaggaggacatctccgtggaaagaagtatcaagactcctaatcctagtgcaccatatcatttgtcacatatggaacctcaagaagagttggtatctctaggaatagcatagtctaaaacatgcgttagcaggagacaacgaacatgaggaacagctgaagtgaaggaaacaaaacaaacaggtcttgattcagtccaggcctaaatcaggcattaaggcattattatttactcaaaatggggttttggcccctggcgtcggactacatatgcacactatgattgtgacacaagacctggctctatttcttgcgcatgtcagctcactacacaactatctctcttttcagattcaaggctatttgcaataagccaaagcttcatcttttgcctgtacccgagccctaccatgacccgatttgagtattttcgatagaccacgtgatggtcccgagaccggcgatcaagatgttgatcataatgagaatacataaaagactttgaattgcgaaagtagttctgagtcatttcgtgggatgctgttttgactggacatgattcaatggtatgtccatagcattctgaaagctagcagctaacagcttacagctccgcaagtcaaagcagaaaaattcaaatgttatagtccaagatatagaacggaccaagacccataggaggtgaggatagcctcgggagaaaaagatttaaggttatcctcggtgaagagctcgttgggaaaaaaaaccgaaggatcttccctcaacctcaacctcaacctcaatcttgaaaatctcaacctcaccggagatttgaattccatctcggatgttcaagtctatgagtcacgcgattcgtgcataagactataagacttccttaatatcggggacttttaaggatcttattgaggggtctttttctccgccaagatccacccctctctttatcagatccgaaaacggagtattttttcgagatccaagtcaacgtatgtttatacctctctgacctcagggaagatagcctgtgtccaggaggaattgaactatacaaaatgaacagccattgactcacaattcacagaaatccatctagttgatatcccgggccattggcgtccttcaattggcattgcttttagcggctatttgcccgcaaagaggctgaataaagattctatacacatataatattaataagacgacaagatgtccaccaaagatcaacatgcctctgtcagcattgacaagcaacctatctctgaggatatttccgagcagccagagcctcaaagccaggtatcctcagacgacgtcgactccttggaccatagcgtggccaacatcgaacgaatctacaggtaaatcgcctacccgaaagacaatccaacttcagaacctaacatccacagaaaactggaccgtcgcatcatctccgcattttgggtcctctacttcctttgttcagccatccggtcgaacgtaggcctagcacagacaatgaacacagactctggccacgacctcgcaagtgtgctccacctaacccgacacgagatctcaaccggtctcgccctcttctacgtctgctacgtggtcttcgacctcccgtcgaacctaatcatgacccgtctaagcccccacgtctggatgagccgcatcgtggtcagcgtaggcctaattggaagctgtctcgccgctatgaaggcagcctggagcttttagtatgttcaattctcccgcaccatcccaattcatcccacatcatgtatctaacaaacctagcctcctccgcctcctcctcggcatcgtcacagcaggcatgtggccaggcatgacatactacctaaccctcttctacccaccctcccgcatcggaaaacgcatcggacaatacttcacagcctcgcaagtctccgccgccgtcgtcggactcgtctcagccgggttccaaaaaatggacggcgcccacggcctcgtcggcttccagtggatgttcctcgtctacggcgtcatcaccgtcgccctgggcttcggcctgctctggtggttaccggacagacccacggcgccgggcgagtcagcgccgaaacgcacctggatcatgcgctgggtgcctgctaccgcgccggcgctgaaaggcgctgacgccgtcgtgcactaccatgacctgaagcgcgtgtatcactcgtcggcatggacgctgcgggatctgctcgcggtgtttttggattggagactgtatccgctgctgattatgtactttggtgttgtgggtgttgggattggcgtgcagttgtatgcgaacttgattatcaaggctattgatccgactttgagtgatgtttcgttgagtttgttgacggctccgatttggattgtaggtttcccccctcttcttatcctttcctcctttctttccgtccaagatccatccgctaacacatctatagatggacctcatagccatcctcctcgtaacccccctctcagaccgcttccaccgccaccgtgcaatcttcttctccatccccgtcctgctccaaattctcggcctcctcctaacaacctacgcgggcacagacgccaacccgtggccacggtacggcggcctcctaatcgtcggattcggactaggcccaacagtcccgataaccatgacgtggacgacggagatcttccagccgcgacacggcgaggtcggcgtagccgctgcgtcggctgttgtctccggactcgggaatctgggcagtatcctcacgacgtatgcgctgtattcgggctggaagagtgactacgaggcgcctgggcgtgagaagtataggaagagtaacctggtcatgattgggattctcggggcgagtattgtctctgccgggttcatggaggttatgttgcgctttgtggatgggaggtatcggggtggtgatgatgagggggcggttgatggggctgccaggcgggaggtgcggcagcgggggttgcatgggttgggggccggggttacgcgttggttgaggatggggaggtgatcggtagacttgtgtgtggccgtggtgcaacggtgaaaatgttggcatatttctctagattttctgcttgcgtggacttttatagaactatagaagggaatgaatacgatctactttatagatggagaatacctgcttcgttcatccagatccatgcttctacaaagttggtcgtgctcggctatttgatcctgtcatatactccatgctctataaaggggaagaagcttccgttggatgctggagtgatactagattgagttcaagatccttccatgtgagatcgaaatactccgaggtctgattaagattagaccaatgaaaaaggaatacgaaaagtacaagagcagcaattcggcgtaagcgcaaaacaaagttgaggtcagtaacaattgaacttggtattaattgtcgattctccagaggaacgatatcagtatgatatctctcgataaacgatggtgtggtttccccatccatgaatattctatgctattgtacgtgtcacattaccctgtgaagggaagtcgagagaaacagaaaaaaataagtgcggctggtgcaacgagggagggccagcaggaacgcataggcggacactggaaccgggagaaagaaagggatagaacgagaagaaagacaggaagaggaagagagaaaaggcagatcacagaacatctatgggggctccctcacgcagtcaagccgctctggtccgactcccaggttgacgccgagggtatcggagcgctaagaccaaatgattccaatccatttagatgccaccacacatagtctcaacgatgataccggtaatctggtagggatcagcgttggaagcggggcgacgatcctcaaagtaacccttgccgtccttggcgcactggcgggggatacggatggagccaccacggtcggcaacaccgtaagagaacttgtcgatgctgccggtctcgtggcgaccggtgagacgctcctcgttaccctcaccgtagacggcgatgtgctcaacgtggcgggcctcgaacttcttcatgacggcctcaataaccttcataccaccatcggcacgagtggcgttggtggagacgttggagtgaagaccggcaccgttccactcacccttgatgggcttggggtcgaaggagatgcggacaccaaactcttcagcgacacggtggagaaggaaacgggacatccagaggtgatcacccactaaattaacagttagtctcagatattcattgcagtccgggattgcgaaacttactatcgatgccagggcaggggccaacctggtactcccactgggaaggcatgacctcggcgttgataccagagatgttgataccggcgtacaggcaggcacggtagtgagcctcgacgatatcacggcagtagaccttgccggtaccgacaccgcagtagtaaggaccctgggcaccggggaaaccgccacggggccagccgtagggccacccatcggtaccgaggagagtgtactcctgctccagaccgaaccagaagccctcgctggcgtgagcctccatcagacggttggcatcatgacggtagttgaacttgttggggcttccatcggcatcccaggtctcgcagaggacaaggatgttgtcaccctggcggaaggggtcggggtagtaagcgacggggcgaaggtagacatcggagttgtcaccgggggcctggttggtggaggaaccgtcaaagttccactcagggagctcatcaacactcgtgacgggcttaaagagagtctgttggattcccgttagtgagttgttcgagggagcgcgatctcacgtgacggcgggtggctgcgtcgcatagatcaagaatccccgtgcaccatatccgtgcacagggcttatcacagccgggaggggattccagataagaacacgcagcaaccacgcgccgacagtccaccatgtgtagccagagaaaacgtgggaattgagatgagtcataccttcgtcttggagcgagtgccaccgttggagtcaatccaaacgtattcagcttgaacgcgtccacgctggtcaaggttcatgtatttcatgagctgtttcagtcagtatatgtcattcctcactggctcgaaggccattgtggaaatccaaaatcaagaatcaaacgcacattccccgtgttggagacgacagttgcagattcggacgcctgagaagaagcggtcagcattggttctacacgcacaagagagagggatgactcgtaccatagtgaatatgggtatgtgtgatgttttaacaggttttcaagcaatcaagcaatgacttttgtagagaagagtcccgaaggaaggaaaacacgaagggacctcaagaatagaaagcgaattggatatggatgggagaatccagaggagagaatgagttttaaagatgtggaggggcaagggagggatgataacctttgggaaaaaaaaaggaatttaaatttagtcactgactttctcttttgggaatttctttttttatttcttttgtttttttcttggcaaaatcaggaaggcgcggctcagccactacctaaaggggtcaagcgtggtatcatcgctgtaatggtctgtaaagcggtcgaccgatacggggtacagataaagtacctcatacatatttgtgcgcgtcggcaaagcctttcctgaaacgttggggaattaaaaaaaaaaaaaagccctcactctattttagtgcttctccgttctccgttctccgtcccgtcagtattctccagttatttcaatataccatttttaatgcctcaatatcaaaatagatcgtctacaatgtcacaaggacctcttagtttttcttagtttttcttcagccgagcggaacgccgtagcctgtgaagttgcaacttttcaccgagattcaacgccactcattaacttccgtgtcatcatcgtcgcatcatccagacaccccccc

SEQ ID NO: 158 - DNA, 296506 bp, Penicillium roqueforti
  misc_feature (113)..(1575): n is a, c, g, or t
  misc_feature (13292)..(13456): n is a, c, g, or t
  misc_feature (30858)..(31005): n is a, c, g, or t
  misc_feature (105392)..(105535): n is a, c, g, or t
  misc_feature (186993)..(187000): n is a, c, g, or t
  misc_feature (220908)..(221153): n is a, c, g, or t
  misc_feature (242095)..(242339): n is a, c, g, or t
  misc_feature (276572)..(276790): n is a, c, g, or t
  misc_feature (282213)..(283913): n is a, c, g, or t
  misc_feature (288905)..(295191): n is a, c, g, or t
aagacaattaactcagaagatcaactcagagtattaactcggaagattaactcagagtattaactcagaggtttaactcagacaattaactcagaggtttaacttagaggatnnnnnnnnnnnnnnnnnnnnnnnnnnnnnnnnnnnnnnnnnnnnnnnnnnnnnnnnnnnnnnnnnnnnnnnnnnnnnnnnnnnnnnnnnnnnnnnnnnnnnnnnnnnnnnnnnnnnnnnnnnnnnnnnnnnnnnnnnnnnnnnnnnnnnnnnnnnnnnnnnnnnnnnnnnnnnnnnnnnnnnnnnnnnnnnnnnnnnnnnnnnnnnnnnnnnnnnnnnnnnnnnnnnnnnnnnnnnnnnnnnnnnnnnnnnnnnnnnnnnnnnnnnnnnnnnnnnnnnnnnnnnnnnnnnnnnnnnnnnnnnnnnnnnnnnnnnnnnnnnnnnnnnnnnnnnnnnnnnnnnnnnnnnnnnnnnnnnnnnnnnnnnnnnnnnnnnnnnnnnnnnnnnnnnnnnnnnnnnnnnnnnnnnnnnnnnnnnnnnnnnnnnnnnnnnnnnnnnnnnnnnnnnnnnnnnnnnnnnnnnnnnnnnnnnnnnnnnnnnnnnnnnnnnnnnnnnnnnnnnnnnnnnnnnnnnnnnnnnnnnnnnnnnnnnnnnnnnnnnnnnnnnnnnnnnnnnnnnnnnnnnnnnnnnnnnnnnnnnnnnnnnnnnnnnnnnnnnnnnnnnnnnnnnnnnnnnnnnnnnnnnnnnnnnnnnnnnnnnnnnnnnnnnnnnnnnnnnnnnnnnnnnnnnnnnnnnnnnnnnnnnnnnnnnnnnnnnnnnnnnnnnnnnnnnnnnnnnnnnnnnnnnnnnnnnnnnnnnnnnnnnnnnnnnnnnnnnnnnnnnnnnnnnnnnnnnnnnnnnnnnnnnnnnnnnnnnnnnnnnnnnnnnnnnnnnnnnnnnnnnnnnnnnnnnnnnnnnnnnnnnnnnnnnnnnnnnnnnnnnnnnnnnnnnnnnnnnnnnnnnnnnnnnnnnnnnnnnnnnnnnnnnnnnnnnnnnnnnnnnnnnnnnnnnnnnnnnnnnnnnnnnnnnnnnnnnnnnnnnnnnnnnnnnnnnnnnnnnnnnnnnnnnnnnnnnnnnnnnnnnnnnnnnnnnnnnnnnnnnnnnnnnnnnnnnnnnnnnnnnnnnnnnnnnnnnnnnnnnnnnnnnnnnnnnnnnnnnnnnnnnnnnnnnnnnnnnnnnnnnnnnnnnnnnnnnnnnnnnnnnnnnnnnnnnnnnnnnnnnnnnnnnnnnnnnnnnnnnnnnnnnnnnnnnnnnnnnnnnnnnnnnnnnnnnnnnnnnnnnnnnnnnnnnnnnnnnnnnnnnnnnnnnnnnnnnnnnnnnnnnnnnnnnnnnnnnnnnnnnnnnnnnnnnnnnnnnnnnnnnnnnnnnnnnnnnnnnnnnnnnnnnnnnnnnnnnnnnnnnnnnnnnnnnnnnnnnnnnnnnnnnnnnnnnnnnnnnnnnnnnnnnnnnnnnnnnnnnnnnnnnnnnnnnnnnnnnnnnnnnnnnnnnnnnnnnnnnnnnnnnnnnnnnnnnnnnnnnnnnnnnnnnnnnnnnnnnnnnnnnnnntagtaaattggatgcacaaatttaaggtccctactataagtactcaaaatttcaaagggttaaaatacagttaagaggtagttatggtgcgtacaaaatatggccgaattaggttagtgtcattcttcccgtagccctaaacctcaaagatataccttaactttaaccacgaatttcagacgctacactagctggatacgaaagataagatatgatctagaatgcttaagaaaagggctttctagtgatactaaaataatagtaaatactcattattttatatgtacttaggctctatgatttcctatatagaaacgtctagctagcgcggcacccaggctactagcccattcaacccaaacgcgattgaagaaactgtttaatagtgctaggtataccaaatcctgtttctagcacgggtagatatcaatttatgtccgcgatccccggataccggacataataggcctgccagtcatcaatctcagtcatcttgtggaatcccggaagctgcacaatacgccagcgtatgttcatccagcccacgtcatcctcagtacacccttcaaggggctcgaactcctcaggctctgatatatcctcgtcctcagagtcctcttcaggcacatctgtccatttccattcagcattaaccatgcggacatgccctaattcatattcttcgaaccctcccaagggggtgtttagaacggactccatagcctcctggtccacggtgatgaagaagcggtatcggccgctcgttggagtatagtcttcgcttacgccctgttcctcttttaatgcagtcttcttccactgatagaagtgctcgcgtagggtggcaaccgtggcaccctcaaaggaggggtcttccaagaccgttggggcgaatgtgtcgaggagatcaaggccactgtattccttaaggtcttctgagacggcgccgaccatgcgagccatgaagttctcccagtcagagtcattgtggtacgtgcaacgaaagatcacgaagccccaggttgtgaatccatcctccttgagaagtccctcgaccagatcagccccattcataaaggaatacattgtgggatcgcgctttgagcgagaggccattgtggtggatgttgagagactcctgattgtgttgaaatgtgatgtagataaggactttgcgagacgtgagggaggttcgaagggaaagcgaaagaaggtcgggcgggtaacgcttgggcgggcgaattggctgtagatcggtagatggcgtgtagtttgaagtatcctcctagtagtcatgagtgcgaaggcaggccttggttctgttgagatgaggataagtaggggaaagaggtgggggctagggggtatggtccaggggcaagcaggatctctcaagtttgcagagatttaaagtggagatgcgagtataccctcaaacgctttaaattgcttaaatctcaggttcccaggatgatgaaacactacgcccgtctgggcaaggggagaagtgatcggagcctcggagggccggccggggaagggattcgcgggtccgtgttatcgggcggctcggaataagttcgatacgcgcgctatggtcataaatcaagagcaatttcttctaccgtggatactctgaccatttagtcgcaattttacccacaagactgggcagttgcaccttggcatgatgtcttatcgacttacaccacactaacttcatacatacgcatctatgaagaaacccccacacacaccgagtacccgactcctagatactcacagtccgatccaatcgcaggattccacttgtatagttcagcaaaagtaataccatacgcggtctcgatcttggcgcacgaatcgttcgacaccaccgtgtaatactggttgcagttcgacgcgattcccgtctgagtgggtgcacttgctgttgcgctggtcgtcgatgccggtcccttgacacagtatgcttctcctagccacaaattggtacaagtagagccaacactggggttccactgatagaattgagcaagggtgatgctgaacttggtctcgactgtggcacagtcgtcgccctttgtagtggtgtagaacttctcgcatcccgacacagtgtcggttggagtgggccccatggaagaggaggaggaggtggtggtgggggtttgggtggcagttccactggctgtagtcgttgcagctgcagacccgacaccaatacagatggcgcggtcatccgtggcatttaggctggcatagagcgcagtgtcacagtctccttccagccagctgttccaggacacaaggtcgtccatggtcaggctgtaatcgtaaatgatgtcgtcgcaggtgtatactagcatttgattagtaatagcacgattggggagggtcaaatcataccgtcagagtaagacaggtcgacggaggtgaagcaattgcagttgaatgccgttccagcctccgtagcattcatgggaaggcagagcccactatcagtatcctccgttgctacatctgcgtcagcctaatctatttgttcgagccagcggtacttacaggcagtgctgttttcataccgcaggatgcagtagctgttttccttgttgagctcacaggtgcttgcgttgttcacaagacttggattccaagtgaccatttgtttcattgtaatgccccaaaatgtcgccatcgccacacactcagaagtatagttggaaggattttcgtagtcatagcagtctgggatagtgcccgaagcggtgggaaggagcgccgctcccgtatacacatagccaggatcgcttgtggccgtaggtatgtcagtattcacgttggtgaagttgacgggcgtgacggtgatgggcaatactccagtcaccgtgtagtttgcgtagctggtgattgaaccaacggccttaacacagtatgcctcgtcaagcaggaggtttgtgcagtttgcgtcgatttctgggttcaggaagtagaagtcggtaagggagatagaatgggcgagagagaccttggcacattcatcgcctttttgaacctagtagaaatgagcaaagacccaacttggatggaaggatcactcaccgtataccactggctgcagttgcggttgctattgtccatagcatttgttgggaccgctgcaatgccagtggctactccagtttcggttgcgcttgagtcggatccaccagcagtctgattcaagtagccactcgggggactgtaaaggtcaatattccgtgactctcaaattgagattgaagcgaaatctactcacctcacacacacctcatatccaatgaagaaaatcgcattcagacagagggaattgatattggggttccaggagaagaactgcggaagagtcacattcgcgaggccgccgacgacactatcgcaagtgtcatcagcctgccaggtgtgtgtggtgcactgcgaggggacacagagtgtctggttgactttcgccgcaaagttttgacagtagagatccaagtcgttggtttgcagtaggtagtatgtagagactcccagcgactttgccacggagttacagtcgtctgtttccttcacctgataatagttttcgcagctggttgttgccgagctggttgcaggcgagctggttgcagtcgcagttgcattaagcgcgtacgcagttggggaagtgactgagtaacccgtggcgctgcagctcgacgtcaaagaagtgaagctgtccgccacgccctcatcataccctaaggggctgtttaattgagtctctaatgtccccagccaacaatccgagcaagaaccattaacaggccaagacccgttggaccaggagagcaattgcgggtcacagtaacccccggacctaatgatggtcagaatcgataatcattggcagaatcaccactcactcatctttccgacaagatatgtcataggtcaacatgtacttgtcagcgataaatgtagctggataagctacatcctcaacgacgatcacatcggtggtctctgagcaggccgccttgatggttgctctggcgcttttcaaagaactatagcaggtgtcgacgcaaagttcatcgacttgatcaccatccagaagagagttgctgtttaaatcagctttgagcccgcaatttatgaatcagacctactctggggacacaacgggcagaaatgccggacaggacacattagtcgacaaggcttctttgcaaccatcggtgagaccaggatagcttgtgaatcctcgaatgccagcaggctgctgggcaagggccgtggaaattagtagagcccacggggcagtccacatcccacgcatctttgagcaatgtagtaatcaccactcaagataatgaattggtgagactgcaaccactagatagcctggtatacaagtattccagagctcaattcacaaggaagagagaagaaaagtggaaaaatgatgttgggacttcgctgagtagttccatatgcagagcaattttatcattctgcatctagacaaagtatatggctcgttcagcactggcccccaagggtacaatcgtttccacatccacttcacttccaatcgggcatatcccggacgggtctcacgaggattttgagattactgcggagctcaagggctgccgcttggttagactagaatcaagcatgcaggcgaagacttagcgatcacttgaaacatgagaaattttctttggatcgagtttagcgagggattccaagctacggagtacgcgaagagtacctcagtggcttgatgcggatccttcggccgcgtaccgtgggctcgactagtagtccctagtagtccctggcttagcgtcggttcacctactcatcctgtctgaaccgggggccaaatggtgggtcgtaaaattaaatcaaaccgcgcgtgcagtagatcgatttcacgctccgtagttgagagtatggtcagtggccttgacgaagatttgaatttttgaatttttggatgggatcttttgataccgccaatccgagtagtatttggctttctataatcaggctgatttgtagaagcctagaatagcagaatatttatcgcaacaccaatataagatacttttcacaaactccggatcgctcggttgatccaccagcttcagttaattaatacctcattatcagtgccggtggtttcatccatttttcggatacctagacgtggtggggctttatgtaggatacctagtgtagagctgaaaccacccggtgtagacccacatggcgtatctgcaagcatgctggaacaatgcacttagcgtatactgcccaaaggccttctttgcagggctatctacatttcctgtaaaaggagggatttctccaagtccagtgtatcaatgctcagtctattttgaccctgttcgttctttccatcatcctttccttcatttctcttgcatgagattgccttgagcaagccaatctgctgcaatggctactggtcaagctttcaaaaaggagcacttctttcgtgttctctttggcattgtgcttggcttattgtgtctggtcttctggccgcacagcttgaaactgtctggctctagtattgctcgccgcgcttccactgttgacagcttagaagtcaataaccacgtttccatctctgcccgagatgattactcctgcagtgctagcaatccctgcagcaatggagcttgctgcggtgccagtggctactgtggctacggtgatacatactgtggcaaggggtgtgtctcaaactgcgatgctattgcagagtgcggaaagtacacgcagcctgcgaacaagacatgcccactcaacacttgctgtagcgaatttggatttgtgggttgctatttcataagttagacgaacacggttaacctctattagtgcgggacaacgaaagacttctgcaatggtatgtccttcagttcctgatctcaaccagagactgacgactagaagatgcttgccagagcaactgtcatctgaatgtcactgtcccggcaggtggatcctcaagcggtgtactgcaaaacaaggtcatcggctattacgaggcatggatggctcgtaagagctgccacaaaatcaagccggtcaacttgccattggatgcactgactcagtgagccctattgctttcctaaccagtcatgcccatgctgacattgagcagtgtaaactttgcatttgcatcgattgatccttccacatatcaggtcgttgcgatggactcggcaactccgacaagtctcttctcagatgtgaccaacctcaagtctgtgaaggaagatatcaaggtctatgtcagcattggagggtggactttctctgataacggcaccgacacacagcccgtgttcggagatatcgctgcatccacgagcaatcgcaaaaagttcgccaataatgtggtacacttcatgcgtcaatacggtatcttcacttatttgtttgtttgtcttatctaatctttaacagggtttgacggtgtcgatcttgattgggaatatcctggtgctggtgaccgaggtggcaaggccagagacacagaaaactacgtcctcttgctcaagaccctcaaagaggttttcgatgatagcggaaacaagtatgggctgaccttcacagccccttcgtcatactggtatcttcgatggtttgatctcccaaaaatggtcaagtacgcggattggattaatatcatgacatacgatcttcatggagtgtgggatgcctccaatccaattggaagtattttgcagggacatactaatctgactgagatcaagagtgccctcgatcttttttggagggttgaggtccctccctcgaaagtggtcctgggtcttggattttacggtcgtgcgttcacccttcaagataaggaatgttcaaagcccggttgtgcattcaagggtgcctcgggccctgggtcctgctcggatacagctggtatgctcgcgtactatgagattgccagcattctgcagggaacctcgaagaaacgagccaccatctccccagtccacgataaggaggctgcagtcaactatttcacctttgatgacaatcagtgggtttcatacgatgacaagactacattcaagcaaaaggtctcctgggcggatgaagtcgggctgggaggggcaatgatctgggcatctgacttgggtatgattttgcttgctctgagcgaatttacactaactattcattagacaccgataaatacgatgcccatacagacctcattgatcgagaaatcatatcgacatcaacactcaagcttgagaacaaggcaaaggcaaatcccgggacaaccgtcgaagatttgtctgcgttcacagggcagaaatgtttcaagcacacagggaaatgtctcaaaattgacgatacaaaagccatgtccaaagcatgtggcagcggctatactgttgtcggctgggacgacgcagggtgcggaaagtccaactgcgtaagtgaaccatctatgctcggtcaattcatgtctcacgattctgtcttcatcagcattgcggaaagccgatttgttgcccaactggtgccgccccgaagaactgcatgtggcgtggacaggatactggccaaaagggagctagttctgactgcagcgggcaatgtgccgcgggagaaatcaacgttgccggcattcgctcttcttggggtggcgggtatctcaacgataaaaacacgggcaagtgcggtcgtggctataaggcattctgctgtccagaccctgactacaagcaagttaccaagacttgctcttgggccaagtggtgcgtaccaactcaagtcaattgactatgcaccaactgacttttttacacctccagtggggagaactgcccacccagaaaatctgctgttctaacaaagtatgacgaatgttattccaaaggacgaaagtattgttgttccgatccagcggagctggtcagttgccaatgggagaatggaagcggcggtgacggcgattgcgcgaatgccgtgtgcaattcaactcaagttgagatcgccaagtctaccttaggtgatggcagtacctcttgtgaatgtaagtttgtctactttcaatctctcgttttgctttctgtatagtggcctaacaaggatctgattagggggccgacaacggtcaggatgctgtacagtgacgaaggcgccaacccgcaaggcaacctgcacttacaacatctgcgacttggattccgactattgctattccgatccgcttctttataagagagacgatcaagacaccccagactccgattacagtggtgacgactccagcatcgccaaacgtgctggtagagaacgcaagacattcaaaattgtacttgggacattcagctactggatcgcgggctatccaagcattggcaagctcttaaatccggaaaaatacggagctgctttactcacaaaggctttccgaacgcggagcggcttttgcgcaggctctacgctggatatcgtcaacttgccgaaaaatcctactgaaaagcaacgaaaagatcttgacacagagcatccgcttgacaaggggttgcagggacttttctacaagtacatggggaatcgagagctcccaggcgatagatccgccaatttcccaaagattgatcccaagttctgggacaaattcaatgagcccaatgcaaaactaggtgccatggctcaattcggcaaggaccgcaagggaaaaaagccgatgtccccggcagagtatttggccgaagcttatgggtccgaaaggaacccacggcccttcatgccggttgaaaatggcctgaatattgccaaaagagatattttcttgggcaaatctccggtccaagctacaaagctcaggaaagctgcaacgtccgctgtcaaagcggacacagatacagcggcagacaagatgctttcgttgcttcaaactgtaagtggctatggctttgttctggatttcacgcaagctaacccaggtttctaggccttttcctcctttgaatatattcgaaatgagatgtttctggagagattcgacggagtgatcgatgatacattcacagcttggagtaatatcgagcaggcgactgagacgtataacctgcagaattggcacgggttggtcttggatgctcagttcacgtatgccctggatcaggcacgtcgctgggcacgggaatcaattcgaattgccagggctccgtatgtcgaagcatatgaggccggtcgcagcttggccacttatgatcgtgtgatgactgccttggatcagtttgaggatcttatctcgcagattaagatgccggatgttacttccgaggactacaagaagcggaatccctataatggtgaggggccaagtggatctaactcatgatttagaaccttgaaaatttacgattccaattcaatgatcagccttaccgagtcttccagcgatgcatcttcactctggtctttcggagagctatgttggtctgggatcgatcgatatatactgcgtatgacggaaagtgggtttccctgccgagcttcgtctttcccaaagaggaaaaggtgcctcaagatgattattttcaaaatctcccagcgagatggtgaggctcgggagcttgaatgtcgtaactgatggcaaatataatcagctttgtagtcttaaagcagttgaagtgtctgaggctggtagggtaccgaaggcgcagcagcaatgtatggtagaatcgatgattgtaggagacaagagagaaaaagagagagaagctgtcgaaatctaaactacgcgggagccaaacggggagccaaacatagctataaccgaggaatctagggagagaggcaaaagcgggctgaattggctaaatctactactcattgcctagctggggaaaagaaggaagagagagagagagagctatatagtccggataatcacctaaccttccaatccaagaataaccaactagcctccgaatactgcgagagatgaaagggaaataaaagtaaaaaagtagctataaaacgaagtttacgtcggcgggggaaggagcatctccctacaattgcaatcgtcacgtcgccacctgttggctaagtgtcaaggtaatgtacgagttcttagagtaaaagactaggaataattgatttttcaatgaagtacaagtagtgatttaaggtgtgatgtttgtgggtctattgagccccggtaagtggggcctttgatggtctttaatgctattcctattagtgtactaccatagaagaaagcggtctatggtagaatcttagacttaagaagataatatatagttaaccctattaaaatatcttaaatccgcctatataataaagggctaatacctagtactaaagctaggcttagaacctatacttttataagtagacttcttagggagttcaatataaactattaaaaccttagcgcgatttagcctacctgagacatttatttccgagcctccgtaaaaaaaagaatatttggaaatgttcctccagaattaccccaaatgaaactcaaatcctcttatgtccgagtgctaccgctgatccagggatttgggcttatttcgggttcggctgtagcggccgagatttccgagtgcgtaaaaccaagtgtatcttcggagtcacctccgacccgaactcggagctcggcttagtggacaggccttttccatatgaatttgccgaggggtccaagtatacctgcctgccataagcccgaaacatagaaaaagacctgcaattgaaaagaatgatggattaaagcattgtagcgtttctacgtctgcagtatcggtggagatactattcaacaagggccgagatttattaggcgtgagtagaaatagtttgaacgctgagaccatgcggcggttaatgttgttacgaggtatacagtccactgccactagtagcagacctctattatccaaataaaatagtgtgccatcctgagtggtgtgtgtgtctatctcgaatgatgacattatttaccagatgatcgacaaatagtatttcctacttggatagagaaccctcatttggacgggagataaaacaagatgtcggaattgtggatctatgtaattagataatccttaccctacaaacagaggagctactccggcaccgagtcaccgactacgaaggtgtatagtggccaacagtcggatgcctgattttaatggttttatcgcctaattgggactagctcttaccagttttagaccgcctttgacaccgctcaataccatcttttgtaagtacacatcgaagagacgaaactgttaccatggggtaattcaaatgccttctacctattttaattctcaaaactacattcaaatattcgccacgccggagccagaggatacggagagtttgaagtttatacggtcggtaggaatggggactttgtgttgaaatccaggcttggctttccaaccgttttgggccttggtgtcagttgcgctattagcttttctccgggaaagtgcgggactacggcgggtatgaatggctttaaatacaggagattcatatagttggagggccttaacgcctaggatcgatgagaaatagtattttggggggggggggggggggtatgcaaactttctttttccaatttttaaccnnnnnnnnnnnnnnnnnnnnnnnnnnnnnnnnnnnnnnnnnnnnnnnnnnnnnnnnnnnnnnnnnnnnnnnnnnnnnnnnnnnnnnnnnnnnnnnnnnnnnnnnnnnnnnnnnnnnnnnnnnnnnnnnnnnnnnnnnnnnnnnnnnnnnnnnnnnnnnnnnnnnnagatgggggggggggggggggggggggggggggggggtatgaatagcttcatgtttcaactttcaagctgttctcaatttggtactaggagatctgtcatagtaattcaggtattttaatttcctgccggtctaaaattggtaagagctagtcctaattaggctataaaaccattaaaatcaggcatccggctgttggccgctatacaccttcgtacaccgactctcttggcgccctatctagcatggacacgagcctctgtgaggcctgacggacaagccgacagttgcgagacaaattgttgaagatattcggggaatcaggaaagttcacgctctaacacggctctactaacactgcccagtaagcgtcacgtaacgagttatttcactttataactctccaatcttccaatttctttcacctcgcttactgatgggtcaatccgttattgctatgtttaagcaccaaggcctgtaatgcgaaattggatttctctatgcattcggactggcctcgctatggcaaatcttatcaatagataaataggtaggttgcattcttaactactaagatgctccttgaaccactcaagtgcttgcagaaacgcgctctgcatcgcgtatctcaccacggggctctcgtgatcgcctcgcaccgcaaagccatgcttgacaccaccatataggttcatttgccagggaaggttcaattcttttaagatagcctccgtctcctggcgcttctctgcgggaaatatggcatcaagctcggcggcagcaatggccagcgggccctttatgctttttaattcattcgcttcgacgtgcgatgggtgcgcagtgtacccaacgtcaatctttcccggaagtaggtgtcgaacgacatatttgccgccgaaacagtaccccacagctccgagtttctagtttatcctcagtaaatattgtcttcgacaactccaaaaatacgtaccttacaattaaagtttgtatgcatctctctgatgcaagtctcaacaataggatcgatatctatgggaagatgagcttttccttggggatggtattctcccattctccacttctgcatgtcgaattcgcctggtttgttcagcggtacagggtcaccgtgaaagaggtccggcatcataacaaaatagccattcgtcgcaaactggtcagcgatgagttgagcgtttgtgaaccggtggccaatgatgtccgtgagtctatccatcagatggtaagtaagcccagagtaatcggtatgaggccaaaatcgaggattatccgcacttacatcaggatcccattctccgttgacttgttaggagggtggctggtatagacctcgaatccatttagggttgtgatggtgcccagtggctttccataatgtttgcaccctcggtagcagcatgattgggatgggttggaagccattattggataaggaggcgagcactgaaggagtaatcgcacttttcgaatggatctttgccctcggctagcaattgcttttttgattcgagctttcactcaattcaggtgggaggtaccatttaaatattcacacagctagatttcccgatatcgttaatatgtccgaggctcgcacgaacgaaatgacaaagtttctttatcccgggtggtattttgcttcccggtgggaccctcagaaggcgatttgaaaatcataagcggaagcagctgttgggcctaaaaccctactttcggagttaaaagtatgagcattatcgaaccgaaattgttcggggatgaagataggtctctttgaatagtcgccgacgctggtaaaagtggggccgacggtttcccagggttcagataagtcggacttcgcttcccgaaccagccagcccgtttaaagccggaccgaacaacaagtcttccaaatggagcaagttcgtagacattaaatccggtgcagttgatatataattcaatatttgtccaacagatcaaacaggatcacttttttggatgacagcctcaaattttctaattgtgtggtatcgagtgacaatccaaatattttcgcaaacacccctcagcccatcttttgtttttgtctccaacttttcaggacggtggcccagtcggggcttgaagagatggcggcattgaaaaaagagctcgttactcccgataattggtcagaccgggatggtacgacccggtcgatactctccaaacttcgaatccggcacccagatcacgaagtggctcatacccaccgcctaggtcatttgaaaacggatagtgagcacctagtacagtttgacggatcgaacgatccatataaaccattgaactggagcttcaccaagaaaagcgtcaccaccgttctatacggctttatcacaatgggtaagttctcctcggttctttgattattatgttaggtaattgacatctctggcccttttttaggctctgcatgggctagctctgcgtaatttctatggatcttcctttttatctccatgctaacctaatgcagattctctcctgccatctcagacgttgataagcagtatcgaatctccaaggaagttggaaccctcggcgtttctttattcttgtttggagtcggactaggtcctctcttatgggccccctgttcggaagtttatggacgcaaagtcgcggttttagctccatacgcgattgctgtcgcactttcatttgccacagccgtctcgaaagatattcagtctatcatgattactcgtttcttcaccgggttttttggttccgcccctattacaaatgtgggtggtgttctggccgatatttggagttcacagagccgcgctattgcagtgacagtgtatgcactcaccctagtgtctgggacagtgattgcaccaattgtgggtggagcgattgaagtcacaaatcttgattggaggtggactgaatatgtaagtttgttccggtgtactcggcctaccaaaagcaatgtgttataactagatcgcagattactggaataattatggccctctcattaatattaggggccatcttcttggacgaaagttatccacctgtgctgttggtctacaagagccgccaacttcgtctacggtccggaaattgggcacttcacgcccaacatgaagaatgggatgtcactttaagcgagctatcaagcaaacatctggcacgaccatttcagttgttaatgacgccaatatgttttgctatcgctctatacgcctcttttgtctatggggttctctatctcagtttggcttcattcccgatcgagttccaagagctccgcggttggaatccgctagtcggggctttgccatttctaggtcttcttttcgggttcttccttggtgccgcagttaatataaccaaccagagattttacagtcaacgattccaagcgaacaacaatcgtcccgttcccgaagcccgactcccacctatgatgattggttcagtattttttgctgcgggcttgtttatattgggttggactagtgagccgcatatattctggtttggccccatctgcggtgctgtatcaacagggcttggcttcttcaccattttccaagccgcattgaattatctgattgacacattttctgaatactccgcgagtgctgttgcagtcaatactttcctacggagtatatttgccggctgttttccaatctttgcgaatgcgatgtttcataagctgggaacagcttgggcattcagtcttttgggatttgttgccgtcgctctcattccgattccatttgtattttatatatatggcccacagatcagagccagagacagatggtccaaaatatccgtttagcacctgatccgagaagtgaaattttaatccttgaaatagggtaaaagccgccatcatccatctgctgtagcgctcaactcatatcagcttcgagcgatgaacctgtcttgctcccaatcgctctcgtttactttgtcttgtcacaaaccaggtagattaccagaatggacaatgaaaaagtaaaggtctgatagaaaaagcgtgcggatatagtaaaatgtgcaacatagatatttgcataagcctccgcgagatggatcaactgtttgtcctataacggacgctgcagaattttgggttttccttagattgcaactagtttatgccaattgtttcacttgattactccttcccaagcttgcacgagacgagactttacttatttattttaggctgagcggtgagtaacctcggttgggacacctacccaaaaaaacaagtaaaatttcagaagcgccggaaacgccagtagcccaatttttcggagggatggagatcctacactaattccttctcgggtggactttcatggagttagagaaggtgagctaggcgagacaagctgagcgaatacaatccaaaccacgtgcaaagtagcatttctcagagcaatggtgacaacatccttgtggctagccagcatgtcattgaatttcgaaatgttttcacctctgattgtcaaagaaatgtaggcgccaaacgttgtacctcagcgttctaccgattttgagattatattatttccagttcttaacagactctgagttggaaattcaaaactttcagctcatgctggtattctgcggctacacgatgaacccagccaagaacctgacagacggcctgaagtcctttcttcaactttcgaacatcttttttgcttgtttgaaagtcatctatcacattgcgtggtgacaaaaagctctgcaaggcaaagccggcaaggagcagaatactcgtggtcacggagagagggtcgaccatgcttgttaaggctgaagctcagggaacaaattgatagagacataagaacaaataatgcttttttagattgaacgtaaatgatgacgacaagcagtgaatcaacattgtctacgactggcgttccgggaaaactatatgttccttcaattagcccagtgagcatggtcgtggtcctcgttttctccaatccaatttcttggagaaaaaaaagggggagccggctgggccggctggcaatggcccaatccctcaggaaattgcggcagcagggggcagtagcagaaactagaagagacagcatgaagtcagaccaagttagttaggatcgaaataggcacccaaattatcgatgctgttctaggcgaaattcgggataagcgtgaatctcggaggaaagacgcggacacgttaagtcggatttcggatataagcggtataccgagcaaaaagaccacaaatggggaagtgaactccgagggtggctgctgtattgagcgagactatataatatgatagattcctattgataggactgaaattgcctgccctttacagctctcaaatacgaacgagaaaatacctcggtcattgaaaatggggaagaacattcgtttgacctttgcatgcggtccttacgaccgtatggatcctctagctaacaaggctgtcgaccctgtcggaattgatctcaactacatcacgattaatcatccgcgggaaatctttgaccggatgatcagaggcatggagttcgatttatctgaaatgtccagctcggagtatgtttgccgatacgcggctggtgaacgagacttggttggcattccggtgtttccctcgagggctttccgccatagttgcatcgcggtcaactcagacattatctcaagcccatccgacctcaatggcaaaaggataggtgtccaggtgtacactatgaccgcagctgtttggattagaggggttctgcaggatgcaggagtcgatctatctacgattacttggattgaaggagacctagtcaaacctggttcccacggtcaacccaagacaaagccgctgctccgtccagtgtcccgagtcccaaatgaaagcccgaagtcgctcagtcaacttcttgaagagggtgagattgcagccacaattggcgctcacgctccgccatgcctcgcaaaagcatcccatattcgacatttgttcccgaatattcgcgaaaccgagaaagaatactaccagaggactggaatcttccctatcatgcatcttgtcgtcatcaagagagcggttgtggaaaagcatcctttcgtcccgcggagtttattccaggtaatgaatgagtccaaaaacattgctctgcgttcaatgagacttgcatcaacttatcggtatatgttgccgttcctctcatccgacctcgaagagatagaacaactatttggtggtgatccatggccttacggaatcgagtctaatcgcacagttttggaagcgctggtgaacttgctgtatgaccaagctatgatttctcgcaggatttcacttgaggagttatttccattcccttgtgaataagcagtctatgtaactagagagaattgtactaattcaaatccgtgaatgaggcgatttgggccgcagcaaggagaatagtagatggcagaaacgaatccaatggtagatcctagatgtccttacattgtcccccggataactgtcagggatatacatgaagcatacaggacggatggagatatgatctgcgggacccacatggtgtatatgggttcccctgaacgcgaggaagctacctttcctttgcttcctcgcgctacgtcttgtatctagaatagacaatagcttcctcaatattgatcattcaactacgtatacgtgagatcctcacaaggagcgcggcagctcctaggaccagtacatggtgtacaaggtaccgcgatcggcacaggtactaacgttcgcccgtatctgttgacttgtttcctgcatcgaagcggcgtctcgagaagatgtgctataatattctctaatacatatgtatacaactcccgggtttatcgaatagaagcatgattcggtagaccctagagaaacagcgaatacgcctaagggcttagagtaaaggtacagggattttcccctgcggtactatactcgggtcaggatttataatcgaaaatccatcccatgcgcgatatcctcaagctagccgtccagttccccgcgtggcggtcagggctgccacattctatcgtagctgttgacatctaccgcccaggattataggcagcgctagccacaggctatacagacggggttactggccgaggggagcatcccttcgtacacaagcagtcggcagcggcaacgaaaatggacaggcggcgagcagtccttcgctcaatttattcaggaacatatcgcgtgggttattcagttttagctttcgtgcgactgctaggataggcccaaacgcccgttatatcgagattgcggctcaccggcatctcacgagcccggcaaggtataggcagcaaggctaggcacgatggggtctagtaatggttcaggctggcgatgtcgataacggttttttgggggacatttcggtcgcgggcttgaccgtcagaatcgtttgcggcgagagcgctgcttcgaggacgaggaaggaggtaatagggtgatttgggcgggtcaagcagagtagactagtgatgcaaataaagcgaagttgctgaattggtcgacaacctaatacagttgggattttctcgggcaacttagcattctgcaagatgtatcctttgtagatggctcgagaaatcgcgtggagaggctcgcacgttctggactgagacgctcgggtcgcgtcgatgacgcgcctggtcgggattcacgtgacggggggttgtctgttgtctgtctccgcggactgaccaaatgagatcgaatttactagctgttcggttgcaattggatagggctggccggcctgatctgccatgtaaagtccaaaatgctgaaagctgagccagtcatgatgcacggaatgctgcacgcctgccctgaagggcgtacacgctgttcgggtctgtcctgaattgccgttcctcacagagattccggtctatctgctacctcgtccataatcacttctctcgtagctctccacgccgaccacagcgttctgtcatgtgatacccttatcgccaaacacagaaaatcctctatttttcaatcatgcaaaaaactgcgtgttgatttttggaatccttaattcgacttcagcagaatccaagctgaaccccttgcgtcacgtgatgaacttacggccgcggccgcaacgcgtactagagttttccggaattcgagaaggccatgatgcgccaattggaatgttgctctcttttccccttgccgctgctctcgcacgcctagaatccgctcgatatttcaagagacggcacgagttttgcttgagaccgcaggggaaaagatacacttttgtgcttggtccgccgatagttggcgcagggtgctgaagtcgaacacgctgattacaaccgtccgttttctcgtctgaactcttgcctgccgttgtaccagcctcagcctcgccgtcgcgtgtattccttgtaatggcagccgtcgcatgctctgaggcacgtgtcgggtggatgatcgtgggaacgaagagagtatcatctggcataccaggcttgacgtagtcatcgaagtcaacattgaagtggggacggtctgcaccgggactttatggagtctcgcagatcggcttgcttcgatcgcggatctttggacaaagtgcaagggcgtggatccgggcaaggacgtgcctccgatgcggtggaaatcagtgtcatcgtttaggccgtgcgtgttatgggacttcggtgaaaaagacgtatcagagaagcgaagaaagactgcccgcctgagatcgtgaggtggaggtcactcgacctcgtttcgctgaaaggagtcggggaaattcgctggcgttgagctgcttgtcataaggtaatatatcatattgtcggtgctcattgtcggctcaaatcgatggaaggtcgagtggtgtctcgaggacgtctcgatcgggagtggccaggcagatcgatcgcgtcgcgcggcaaggcggtgagggtttgcacgacgcgctgtacatgctcctactgggctctagttctagaaattggcagggacatttacaatggagttacattaaagtatgcgaaatcagaaataaaattaagcaggaattgcgtgtatatatactcggtactgagagaaagattcaaaatagtaccaggcaaagtagatgcgcgcgggaaccaaccacatccaccaaatacccgcatgtcaccgtatgtaaacttggttgagccctgaacgccctcccccatgggatagccctcggtccgccgtctactagggtatatgttcacctcctgctgggccattgctagaacgactggacggcgatccgaagaagtcgagacatgctggaagctcccgaataatagctgtggaatcgttgttggcttctgacgagatgggaattcaaggtcgggatccaccccgagcagctggcagatccggccgggtgtgatctggggcgggccccgcagtaccggcggccagggccggtggaatgagacccacagcgtgctgatgcgtgctccgggccgccgtgctccgggctgccgtgctccgggctgccgtgcaccgtcttgctcgtcgaggccggctagggaactgaaagttccctgctgcatcacggagggttccggcgtagccctcgacttgtttcgggctccgacactggctggacacgaggaagcgaccgggcagggaggagcctcgggatgggacgcagaaggcgaaggaggaggcagcggatcgacgggggcggctgggacgatcaggcgcgtctcgacgggccgaggaatcaacagtccgtgcggatcgatcacgcagcctatctcctccccctgctcggggcgcagcatggccgggactatatcgtcggtcggcatgtcgagcatggacaactcgttcagccggtcatgcgcactagtgatatccccggtaatcacgccgggccgccgcttctggccctgtttcccgtttgtgcagcgcaggaaggcgacccagttcacccagtggcagaattgtggccagtccacgactcgtgcggcgaggaaggcacactgcttggcaaaggtggtgccgtagccgatctgctgcaaccgcgcgacggcactccactcaaaccttttgtgtttctcagtctcgcgggcgcgatcgaccgcagtccggatgggcagccagaccgatttgtcgtccgcgctatacgtctcgaacatggccgtgcactcaaagatggcgaaccattccatgatggttgcgtcgagtgtctcggagagcttcacgaactgatcggcgtactccatgcagaggctgtactgctttgcggggttgccctcgagcttggtgaagctggttcggaaggtcgtgagcaagctcaggatcttcgccggcactcggggggaactgctagatgggagacggacagtacggtgctgggctcctctatgacgagtgggtgggctactcttctggtgatggttctcccctggactctctctgttgttctttttgctctctgtcagctacttcgagtttgcatcctgtgtcattctcacatctagtaaaggcaaaaaggtacgcaactctttcccaccagattatggggcctccgagatctcttctggtaatgggcttaacccggggggtgtggttgtgtatgagagtgtggtgggtggtgtgggtgttggttgggaagtgagagaagagagagaatattttcctcaaagagagagagggagggaaaaaagcccgacaggagagagtaatattcccctccaaatacattcatacaatacaacatcgaacttttgagtactcaacataacgagagagacaaggacaactccacggacaatatatcttaatacaccacaacccgagtccgaggtaggagaatctgtgcaaacagcttctaaagtagaaagtcattttgcttgtgtgtggtgagtatataagccgggccttttcattttgtccctttcttctgtcgagagggcaatcaccgggaaagagagagagagaaggtattagcctaggacgtatataagagaccacacacacacacatactccaaacaggccaaggcattctcacactctctcatctctctcatcccatcccactgttatcctctcggaccccacacgacgcagaggaaatacaaaagccaaatatcaacaagagttactcccccgtcgatgggtttcactgcgtgcgggtcaccaacaaaaaggtcgggtgccactcacgaccgtttcttttttggcgtgtgtggtcatgaaacggccagtcgacctcgggcattgcgacttcgaactctcccctctgaggcttcacttcagcgcaaccgcatacttcactgaggcagccactggaaccgggcccagcctcggccacacaacgatcagcttcagccaatggatagaccttcgaaccctctgggtgtcccaagcaccacagctggaactccgtctctttgtgagctttgatccgatgatcaaggccgccgaacccgcgtttgccaccgagctggtccgagaaatcggccttccagaggtaagcggctccctccgtcggtcactttcttgctcgcgctcaatcgtgcttcccgggggatgaggcccttccaagtgataaccctgagggtattaggtctggtccggcccaggtgctcacagcatgcctggcttcggtgaatatacatctcgaatatacgagctgcaataccacgccacagccagagaattgcctcgtacaaaagtccctggagctattgcgttgcggcctccggaaactgtttctatcgggcgcgcccccgagccatgatctcaggccactcggcaatgggaggctgcataagctaccctcactcgcgccggcagtctttgagccgaggtattgtgaggtgcgttatcaggggtagattatgatacaaccacggtacatatgctgatcggatatgaagggaatggagcaaagggctgtatcactcgctccaattacaacctccctcctctcaatgctcgagagtcatgaaaccttacagcagatgctcgtgatgagactggtaaggcccaccgaccgggatggatacgtaacaccggaatccgcatacggagacacaccggcgagcaaagccacagaccatttgggatgcctgataaaagtcacactgtggaagattgcccagcaccaactcgcgcgcctcaagacccgcaagacggctatgccatttttcaggttacccattgagctaccagagccgtcaatccatccggacgacgacgacgatatgcccccattgctcctgtcagaggaagaatttgattctgaagattctgaagatcgaggcgatggcgacgacgccaacggggatgatgacgatgacggtctgtgaggaaggaggagtgtgttgaagagagtaggtttggatgcggaggaaatgaacatctgcgccaactaggcagtaagaattgattgttggagactcaaggatttgaataacccctgatcgaaggagtactttgtactcaccccaataccactatctgcaagacaaaaacaatattgagcaatacagttctttcgcggtgaacaagcgtgattcctcaacagagtaatgtaagtggcctgccgaggtcgtaagtgactacatatatcatatgacaatgcagcaccaggggtctaagtttatcagatccgatgaattactaagctcttcttgctgggctccttgcggcataggtgacgctactaagaggagccattgaatcaattagcggctagtcaagagggttatattcgcacatttcctattctgtcgcttgtttctcctccaacaaccgcactcggtcgcggattgcaaacttccactccttcgctaccttatataccagcagcaatcctagtacgaagagagggctgaacgaggccacaattgccgtgacgctgatccagaccgccgcatccatcggccaagtggtgccagggtccactcccacagagacgacgacttgtaatccgctcagaaccatggaaaacaaaccgatcacaaacaagataggcccatagaaacgcacgaagtaggtcctatactggtactcggctctctggaagtccgacttgccgaggacaattgggccatagaaatttagccgcatcaaatgaatctcaccgtttacataacgcaaggagacatcccggtctgggatgccggctaggctcgacttgaactcgcaaaactgctcccaggtggtgtcccgcgggacaaggcacaagctagggtcctgcgcaatgcgcaagtcggactcgtgcagtcggtgaaggattctgcccaacccagcgatccaatcaaacatttgagctcatgatgttgctgaacgtctagggaagaagagagaggataccagagggacgcctaccatcggctggcccagcgaggcaaacggcggcggcctggaacctgctatctgggtaataggggcaacatgggcgatcatggtctatcaccgtatgggggctaatgcttgctacttctgtattcaaggagagcgtagtgtatcaagctgtgctggttcgttatgaaactcactaaagagtctaaaaatagaacatagaggctagcaatccataaaaaaaccccctaactaaccccggcaccgcggaattatgtaagttatcgagcgaaggaaccctgaaggtcagtttgactgactaatctcggatttggcggcagtaaaggcaagcagtacaccatcgcctagctcagcaacgcgaaaagagaaaataggaagatgcaagtcgtgtgagactcaaaagaaacagtggtcccactccgtaacaacggccgcgatagtcccaaaacgtctcctttcatcagcccctatggtctttcggaggtgtctggcctcaagcgacaccgctgcctgggaccaccgccttgacaacgtcagaaagggtcactgaactgcttccgattaggaacggtctgatcgatttccgacgagacaggatctgataggttctgccgttgtcgcctgactgatcgaaggaggatttttgcggtgcggatctcatctggtagaataaatccccccttgatcatagggttgggatggttgaggccaggaggaagatccgctgagttccgctggcattctccgtctggccagaccgtgatttttagttggaaattctgaaataagagtgggcggcacttttcatggacacggccaatgcacaacacgcttccagagaaaccccgcgcatcgacttgatcttcatcagttctccacagaatgctagcagaagaatcaacggcattctgaatccatatatgcccatggccctcgaggagagccgcccggatttgttcgttaggaatatccccgagcaggcggccgtgttcattattgatataatcgaagacacaagcaatcatcggtgctccctggatcgcgtctttatatgaagcccattctggcaccatctcaattcccttcggtgggtgaatatcaatcaggttatcgccggtaataagggaaaggtcgtgacggtagccggaggggtatggatacgtgctgcttgggtcatcatatgtccgcgtgataagtccgacctgtttcgttagaaagacttcattcaaggatgggtccgtactcaccctacggttggtgcccgctagccagcactgcttaccgattgggctcgaggaaagggggctaggcgtagtgctgacttcgacctcccgattctggagccgtagagggatttgaaaccgtgtgagagactgtgtgactcgcttgtaaaaagaggcaacgcgggtaaagaatgtagggggccctgggagtctcacaaaggcgtgggtagggacggtgatagcctccgtgtggtcaggaagccggatcttgaggcccaaaacgccacagacctcgtacgcattcgacatgcgcgcaagctgctgaccagactccgctgttgccgccgacggttgcattgccagaacggtatacccgactgtcagcctgccaacggtcggaggggtaccgaagttccatgtatgcaacatgtcatcccgacggctgaagaggataaccacacactcaacctggtagataaacgctccgatggacctcggaaatgccgctcttaggcacttaatgtcttctggcgtaaaagcctgccggacgtcgacgtctcggcggataggatccgaaatgatattgcaatactgcatgtcgtgatctactggagactcaaatgcaggttggatatggatttctcgaccgccagctttaatgaaaggcacatggctattttccggcaccacccaaatgtccttgcctgagtccttctgggtcaggacgcagacagctctctgagatgagaaagccgggtggtaggttcggaaaagttgctcattttcctgggtgatctgcggctcaataagagcgcgagcttcggctacagaacgagagccccacaaggtcgaggttgtccctagttaccaaggttagcaccatcgcaagttcataaccagcctcaaataaaactaatacccacgatggacctggcgtaactgtcgacctcggtattgaataatctgggaaaccggtcggggatgctcttgaacgcacgaatacgtcgccatggtcggtaacgtaaggaaaaggaggtgggtgaagcgatgagaaagggtagaaggaatctctcccctgcaccaacgggctatggacgaaaagttccacaactgctggcacgatatgttttctggtgctgaggagcggtgtatttgtcagtgaagggaaagcggcggggggtcattggagctgggtaaatcgggtcaatgagaagcttccaaccgaagaatgaagcaggagcaagtacgtagatatcacgacgaaagaggtctagcgcctgtcggaacagcagcataggtggatccccggaggcaggggatactatcttccgtcaagattagtcatgcatttgagcccatctacattgctagttgaggggcggtgtgggtgggcagaaaagcacagatataccctgcaccagcatgacccactgagcagtattccgattctcagctaaccattctacagccgccccgcgccatattgttacattttagctattactcttcatttcctaattatatatactcctactaggctctagttctagaaattggcagggatatttacaatgcagttacattagagtatacgaaatcagaaataaaattaagcaggaattgcgtgtatatatactcagtactgagagaaagattcaaaatggtattcagggcactcagggcggatattcacccacctgaatcttcagcccgtacagcaaaatttacattctcacttctgatcgaaatgctataagtaacctttcttttcccctccgcgttcatctctcaagcctcgctttgtcacgagcaagatgcgtaccaagcgtgactcaatgttgaataaccaccctcatttttttatctcccttgtaagtttataatctgcaagatgattatgatccgagtatccattgcctcacacgcgagaggccggccgccaaggtctatctgctacacaaatcagcacacccaagaacaattcggaagaaaaggataagacaattgacaacatgaaaaccgctggtttgaacttgaaatcaatgtttttatcggagtagaagaagaagaaggaggaggagctggatgctgctaatgtctcaatgagaaaagaactgaaagccgtcaaacctcgacttgaaagataggaagctttctttttctaacactcggtggttgattcggaatttgggtatcattgttgactgtatcggtcgagaccaggtgttacacctgccaatttcataaaaagaatacttgttgcgttgagcagaccggcccaactcagtatcatgcgggggtctaggatgtcttaccgcttgtagccaatgagagccgatacttacttccgtctgatttgcaacctgccaatcggattacggcgtgattcccttggtaggggggacggagatagaattagtagtatagagatagatgagccagagttgccagatacaattacgctattccgggcctctcagagaaagcgtaagagtagggtagatgatgatttatagctatactaggaaattgtattgagtttactttctcctgaaaattttactgaaaattttgccgagtcctgctataattacaatacgtattgttacaggcgaggatgtattacttgtgcatccgtgcagtaggggcctgtttgtcttgtttgccttagatttgggcccgaacaggggtccgaaagcccgcgcgggcccatgggctaggcccgtgacccgatcacggnnnnnnnnnnnnnnnnnnnnnnnnnnnnnnnnnnnnnnnnnnnnnnnnnnnnnnnnnnnnnnnnnnnnnnnnnnnnnnnnnnnnnnnnnnnnnnnnnnnnnnnnnnnnnnnnnnnnnnnnnnnnnnnnnnnnnnnnnnnnnnnnnnnncgccgcgggcacgcgcgcggggggggggccgggtcgggtcgggtcaaaacgggctttggagaagtctaggaacaagataagcagtccgaggggtagcttgatgacagacttcgaaaaaaaaagacaatcgagtgttcaatattcatttcattctgagcgccgtaatttcaaaaccaagtgtcatgatatttcacgttaataacagatacaaaaaagtagttgacgagactgaaccaagacaaggaggaaacttagtactgaaggagcggcagacatacccgaagtagtttagcgcggtgtgtgtcgcaagtaaaagagtgtgcgtagacgttctcttcctcgatcgtcaatctctcgcgatagttgcagtagaaatacgccagtctgatcgtactatcgtgccgtatgcgacgatttggatttcgccaatcacaccggaaatcatgagcgtctttccagtccctggggcactgggacagaaaagggtgcgccacattgtttgatcttgatcttgattggaccaagggacgaattcgttcggctcgaggaaccatcgcccggtaccgttgagccagagctttaacttatcgtcttgtttcattgcggtattggtaggagagatccacttcatgagatcaagtcggtccttctgattgagatgctgtactatctgctcgattcctttctgattcaagactgttatgtctttggtttcttggataacttggctagtcataaaaaataaggtcaaatcttggaccctttccccaacttggtatcgaagttctctcactgccgtttggtcctatacaaaacgcttccaaaatagcttcattgcggcgcgaaaattgtttgtgttgatattaaattccccataatcgtccagtttcttccggatatccctcagtaagagttagcatcttttgaaatgtcatgcagagtatggttttgttgctcactcaaatgatggtcataatgctgatcagccagattgaaacatatttgacaatgtttcgactctgtttcgactctgtttcgactctgttttgtcgtcagcaactataatatcggctgtactagaaagctggatatctcactcctcaaaaatgatcctgtactgcaacggtgcatctttgaattgtttccgcagctcattcgcaagtttgaggaaagtatacatgtcacccgcaccatacccaaaattctttctagtggcagaatgtaaaggtatacgttatgcgggtgtaaggcctgtccactgggtaagatacaataggctttgtgggaggaacacaatgtattgatgttgtgaatgtattgatgttgtgccacttgccagtctcgagggggtcccgaactataaggaaatattaagcaaagaagcaaacacataatggcaaataatctatggaattcaaaccgataaaccatgcaggcagtaagcgagcaagcaaacatcaagcatataatagcgatctatcgtatattgtgacaagagctagcaaaccacctgaaaaagatgagataattgaatttgcatggtgccaaatgcttcatgatcatggggtcatcgggcctggttaatctgtcaaggaccctgcgcactatgcccctttgtaatacattcttagatagcttcgtaggatcgatgatagcgtaaatacttgtccaaacaccgaacgccttgcttcccctcccccaattcataacatttggaggatcatcagttcatatcataacatgatcccctgcaccattcatcaccattaaacatcgtcactcactagcaactccggtgggccggaaaactcgatgcagatacaatcaccgcaatcgctaccgcctgtgtttcttcgatcagaccagattgatgcaattcgaagttgaaagacttaccgtggccatatccatgcctggcataatcaccatatccatggcaggtcgatatcccgcctggcagaaggacaacaacgctaactttttattatgccgaatactctctttgatttccataatcctacgattgtcatccaccacgtcatacatcgtcagaacccggccatggctttcgaggtcgatgggcaaattgcgttccttcacgttgcaatctacctgtatcaagttctcgagctccagatgcagatctccgccgagactgtgccgaccgatggcgatgggggtcgtccggcaaccgggaagggatacggtccatgtattgcgtacccagcgcgatcgttggtggatttcgaacaagggtagacctgactgatctcgcacctcccgacaataatgcgggctacatcttcgcccacttacggtgaagagaacggcgccattttcatcttggatggaataggcgcattcggagacggcactgccgcctgggtatagggtgagatgcgtcttctgctctgtcatgtattcaaaacgcaggccgattgggcgcagaggctctttggcaggcttgcgaatatttttgttacgatttctcgtggggaatgaggcaacggatacttccgatgtttcgcttgcgattcgcgtgggcttcgacatggtcgttgttgttaaacggaatcgagacaattcagaccgagtccatccccgtcaagctttctgaaatgatatttggacacagatagaatcgtagaggtcgccctcctgtgggcctctgactgagtacctcgacggactaaacacttccgaccgccgtgtcagcaggaatgtagcaggttgccgtggaatggagaaacccgatttgaaccgtcgcagtcgaacggggcctagatttgtgcaaaagtgcagtttttctgtatggaggaaggactacacttcatccgagtcgtgagaagttcacctcggcaagctcatgatatcatgatgtttggtcccgacccccactgtaccagcagcctctccatcctattcaagattttgatcaatcatgttcaaaacagaaaatggtcgaaagtcaatcaggtctcgtatgacatcagtcagatcaagcccaagtctagccccaaggaagggcgggaatatcctggaagttttattcgtgagatcatctaaagcagtggcagatacaatatagtatagtttattttaagttctttcgcctgattggctggggaacagggggttctccaccagaccggctacttcggatcttcagatgtgcagatgtgtgggggtcatattcaccacggaaggattggcacggaagaatcggcatggcatgctctgctagcctcactgaattcgtgatcgaccttacgagattgacagactcattgggatttcaaaatcaaaatattcggttgatattaggcgcagcgcaagctgaagcatggagaattagatacaatttggtacgcaatattagaaatttcctcagcaaggcacctccctcaatccttaatctccgtaatctcccatttcgcgcgctcttccctccgatccttcacgaccttttgtataatgagggcgagaattccaacacccacgacaaagacaatgcaaaacacgagaataggcccgggttctcgcgaggcccaattgcgcctaacgagctcatcgcggacttcgatacccctcgcgggggaaggatgaatggcagccatctggtgatgcagtttttgagagcaacgaactgagttgagctagatccagctccgacaagtcagaaatccaacggtgtgccatggttgaaaacatgatcatgatctagtctgacttacatggagggtgggtggtcgtaaatatcagagatcagaggtgttgagcagtctgtgggagagtgctcgaaagaaggtgttcaacaaggaagatctagggttgaagagatggcaaaggagcaggcaatagttaacaaaaaccctggagcagactcttgctagaattcaatgcggaagaagttgtctatagcttttccggttctctgacttctgtgacgacatgagaagggctcggcttgcgactttgtcaatatcaatcctgattattgatacggagtactgagcttagatatcgcctgatgttacccacatctgaatatacgacgaatagggtaaaccggatgcttcaaatctttccattctcggcgtcattatcatctctctgcaccggcatgaacggaccggtctatgacatcaagacgaaagcttcttttcgtttgggaaagctcggattgccaggtcagtcaggtccacctcgagcctctacctcatatagtccagcctctgtcgttttaaatcctactcaataatcacttcgtgagaggatcactgtagcgagtgaaaaataaaatccctctctccccttccgttcccctgtcgtcgctgctctcgtgcccccacgagacctgttttggagaatgtcgtctgtatccaatcccaaccgcgacgtcgaaaatgacgctgcggagcgccgattctctgctatttcctataaggaggatgtgaagatcgatgaatacacgcgcctggtgcgatggatgtccacctaccgtgatacgaaatgggaccaggcagatgaaggcgaaattcgcgagagtcgcgtgtggtttgcgccatggcggaagagaaagttccgttggaagtatatcggcgtcggacaggagttccccgatgactggaagttcaccgacatcaatcacggtctgtcggactcggaagtcgaggagaggcgaaaggtgaccggattcaatgaattgacggcggagaaagtcgatcaattccgcaaaatcttgggatacttccaaggtccaattctatatggtgagagactatcgcgtccccgccgattgaacgcagacagtgacacactaaccggacctcgacagtcatggagattgcagttttgctcgctgccggtttggccgaatggattgactttggtgtcatcattggcattctctgtctgaacgctgcagtcggatggtaccaagagaagcaggccgaggacgtggtggccagcctgaaggccgatattgcaatgcgcagcacggttgttcgcaatggaacggaaatcgatatcttggcccgcgacctggtccctggcgacgtggtaagatgagttccctatcctcttgactatttacctctattaacacatcttgtcatattcagattgtcattgaagaggcgaactcggtccccgccgatgccaaagtggtctgcgactaccaagagaaagagacaggctggcagaattatcagcaaatgcggcaagaaggcaagctggacaagaagaagaagaaagcaactgaggatgatgaatcgtcggaagaggatgaacacaaggacttccccgttctggcctgcgatcactccgcaattactggagagtctctcgctgtggaccgctatgccggtgacgacgtgttttacacgactggatgcaaacgaggcaaggcctatgccattgttcaatcgactggaatcaagacctttgtgggtcgcacagcggcgatggttcaacaaggtggctccgggacaggacatttccagatggtcatggacgggattggtacggctcttctggtgcttgtgatggcatggatcttgatcatgtggatcggaggcttcttccgcaacctgcccattgcctctcccggtcaacagaccctcctacactttaccctttctctgttcatcattggtgtgcccgtcgggctgcctgttgtcacgaccaccactctagccgtcggtgcggcttatttggccaagaagaaagcgatcgtccagaagcttacggcaatcgagtctttggctgtaagtattccatcccgagtttctctcacgaccgattttcaagccgatcactgacgccgactagggcgtggacatcctctgttctgataaaacaggaacattgaccgccaataagctcagtatccaggagccatacgtcgccgagggcgttgatgtgaactggttatttgcggttgccattctagcttcttctcacaatgtccgttctttggatccgatcgataaggttacaatcttgtctgcaaacaaatatccgaaagcgaaggaaatcttgcgccaaccgtggaaaaccctaagcttcaccccatttgatccagtgtcgaagcggattgtgtcggttgtgaccctaaatggcgagcggtatacctgcaccaagggagcgccaaaggcagtgcttcagttgacaaactgtgatgaatcggtagccacgttatatcgacagcaggcgacggattttgctcgccgtggctttcgatcacttggtgtcgccgtccagaagggtaacgaaccatggaccttattgggaatgctaccgatgttcgatccgccccgggatgataccgctcagacgattttagaggcccaaaatcttggaatcgcagttaagatgctgactggcgacgcgattgctatcgccaaggagacttgcaaaatgcttgcgttaggaacgaaagtctacaactccgaaagactcatcggtggtggtcttagcggtgcgatggcaagtgaattatgtgagaaggcggacggattcgccgaggttttcccagagcacaaataccaggtagtcgagatgctacaagatattggtcatcttacagctatgacgggtgacggtgtcaacgatgccccatcgctgaagaaagccgactgtggtattgcggtggaaggcgcatcggaagcagctcagtctgccgcggacattgttttcctcgagccagggctatctactatcattgattctatcaaggttcgatccactcaactcatcaatttctgcacattgatcactaacttgctgctagttggcgcgtcaaatttttcaacgtatgaaatcgtatattcagtatcgcattgcactctgcattcacctcgaagtctatctggtcactagcatgatcattatcaaggaaagcatccgcactgatttagtcgtgttcctcgcactatttgccgaccttgcgacggtcgcggtggcttacgacaacgcatccttcgagcgccgacctgtccaatggcaattgccgaagatctgggtcatctctgtcatcctcggtgtcctcttagcactcgggacgtgggtgatccgcgcaacgatgttcctgccgaacggtggattcttccagaattggggctcaatccaagagattttgttcttggaggtcgcattgacggaaaactggctcatctttgtgacgcgtggaggcaacacttggccctccctgcctctgatcattgctatcctcggtgtggatgcactcgcaacttgcttctgtttgtttgggtggttctcgaaccaggatatgataaccgatccctttgatcaatatatcaataaggagaccagcaatggtttcacaaacgttgtcgatgtcgtccgctgttgggggtacagcattggtgtgactgtggtgctcgccctcgtctacttcatcttgaacaagtggaaatggctcgaagacttgggtcgcaccaagaagagcaaaggcgatattgccattggaactatcctcagtcacctgtccactatgagcctccaatacgaaaaggacgcggcgaatcatgggcgaatttggctcggcactaccaaggaggatgagatggaataagcctcaacttctttagaaagacatcattttgtggttcttgttggtggcagcgcggttgattggggagagtgtggtcatatggattcatgggcatttgtcttacgatgaccatcgaccgtgcaattttctattaatcagaagtggtttccaccacttccctaattcactaataatctctcttgacattttggcaatacaacggctgactcgtgtcaccatttacattcctttccgttttgccttaccctgatgcttataagttagatgcaactgtttgccattctctgtactagttatattttgctgcacttcactcgctgcctcatcgtttatatagaccattttgtcttgcgacagctgtgatgcaattggaaaaaaattacggggtcacctttgctcagctgtatgcgtgaaaccctgccatcggcgatgaccgtcaatctcttttgcaaggttatgcgatttgtattgcctccactacgactatcacaaccaccgctgcgccgacacaggcgggaatgaccccttcttgtacataacaatacacggtcaagtccggcgatgggtgtgctgcgattgaaagtacacagactgtcacttttgcccagctttgtgcttggagcgacgccatcggtgacgatttccagtatctttcacttggttacgccgtctgtgccgccatcaagttcacttccccaaccacgacatcgactgcggcaccgacaggaactacgaccagcgtatcttgtagtgaacaatacactgttcttcaaagtgactcatctgctgtgattgaatccaaatagtaagatactgttggtccaaatatagcatcagttttgccggattcaacaagcggttctaaatgatgcattctgacgttctcattgttgccctatgcagtttgcgccaagacacgagttgagagactagtgtaggaagtgcgactttataagttcgagttgcgatgcgtaactatttagtgaagccttaataactaccaacattactaagcatcacgttttgtttagctatgtaatcgtggatcacgcgggataagatgacgacaacgattcgactttccttatttgctgttgcactctatgcatcatgcaagttcagcagcgcgttcttcgcatagtagcagacccgaatcactttttctctaaccagagcccgagttcctttgaccagctaaaccttggttgataactcccaaacatgtcttggtatctcaacgcctggattattgagaggactgatcagtctaccagcagcccgttttcccacagagatgtggaagacacacgaactcattcatctctcccaccaaacgcacactcacaattgaaggtcttggtcgccttttccacaataaagcgcttagatactatttcgagaataaggtaagagaacgccctgctactcaagcctgccacaaaaccgcatcagcaacagagtcattttctacattcttaaactcggcatcatcattgtcatggttcctagtagaaatgcagccaaagcggacaattgcccgtgaaggctcgagcatgcggcctttggttgcctatgaaagtgtatttattggctcctctataacacaaactacctgcaaagtccttctctggccgaaatcctacacctaaagttggctgtacagcatagctgtctcatgcataagaccatgattagccagcctgccccaggtcagcacaccactcttttgctgaatttcctcgattccaaactaacgatctgaattacggggttaaatctttgcattcttcgagatgactacgacgactcgctcagcctgtgacaaatatgcgagtgagcatctcggtggctatgtgatgcattctgaggagatcactgtcgccccatgcagtttgtagacctctccgtgcggcattcctttccctttctctttcttcctctggaagataacttgccggcaaacgcgcagcttgccgcgtcggcgttctctttgtatgtctgcagagatgcttctctcatgttctggtggatggaatctggcttgctttgtggtgggaagctatatagacaggcttcagtacagtagctagtttcagatcttccatcaacatcatcttttgccatctggttgatcacttcttccctcgtagtcaaaacctctcaccaccatgtcgttccagtcgacgtgcaagctacaccgtggattacgagccgagaaacaacgcgtgtcttttagtccagcaaagcgatgcttggtcaatacatcaccgagcttgacgaggcggtcccaaatgcggagggcatcgaaaatcccatattgaagcttactaccatacaaatctctaaaatctctagtttgtaggcgttgaagctctcgcaatttcaaaacattctcatcgattcaactgcatcttaaccgcatatatcatcatatatcctcatcgtcatctgtcattatcgattccaatacccctgaccgtctatcgcccacgaataatctcgaccttcacaaacgtgagatgcttcatcttctctccacccagacaacgcatcattcgtaaagcattaatgtcttgggcttgaaaaaaattgaagaattcaagatcaaccatcacggattcgagactcgaaattcctgccaaaatttcaagtatactgttcctcctttactgagatctgtctgggtaagcatcgtacagcccgtcagcaacgcgaatgttgctgaaagatacttcaccctccccattctggaagaaccgaatcccagtcgagttctgataccaaggccttccgtcgagttagtttacgttctgtggaaatgtgaaaccaaggggataagggaaacataccggacccaggtagacagcacaaagcgagagttggcatatacctccaggacagagttgtcgaccaaaatggtcaggctgagagtctcgatgcgatcctcgcagaccccattcgatgaggagttgtgggcatgactttccgatgaaatttcggacttgcatttagtcgaataaggttcaccatgcttacccttgtgaccacacccgtggccgccatggccacaatggccgcaatcggcgccacagcagtcattgatgtcaaatagacgaagacgccccgactccggtgacttgtcgatgccggtggttgtgtttgcagcagcactcgtttcagaacgatcaatcatgatggactcgttggagaactgataataaacggtggttgactccaaatcggatgccaggatctggaaaccggcttgcaggtcggacgaacgtgcaaggaagtcgatctcagcctcaagaataaagaactttgtttccggggagcgaccgaacgggattatacccgaacttgtaagagtttggtctggctcagtgaagctaggggcagccttcatagcgttgtacggctcccgcgcgatgtcgattccgagtgtttccagtttgacgcatttgcccgtggagggtgaggaagcggccaaacgccacgagccaatctcattcacaagacggttgttgaccacgttcgggatggctttgatgtacaactcgcgcgacgtcaacaatgtgttttgccatccttgttgctccgatgggaagcccacaactcctccgaaaacatccccagtcaaccatacatagcttataaaacgatccggggcaccgctagcggtagacgcttgggaggacgcgggtaggactttgcctgctgctgcataggccgccaagccccagtcaaggacacccaccatatcagggacgaatgtcacgttttcaccctcgggaattgagattgaccctgctgcccaaagctgtgcatgtagcgaggagattgagggctgaatgggcacgtatgagctctctactgcaatggtcatgaaaggactgccgttgtggctgtatccttctctgtcgaggccgaagacgttgctagtctcaaaattgtagccgaatacttttgaccagtcaccattgccccatgttgagttggccggttcatggtaccattctccaagatactcccactgctcaaagtcggggctagtgttctggtagaggaacaggccaggtccaatctccttgaccccgcctgaaacgattgtgtaccaagtaccatctgtgttgccaaggatttcgtcgagtggtccattttgaaaaacaaaagggtcgcggaaagccgttacatccaggccctctgggggttctgggataacaggtggaatttctagcttggagaagttttgtccaccgtcgtaggtgaccgccagagactgcgattcgcttcctcggatataaggaagcgtccaatggattggcaatgccgagaccgaggtgtataaaagtgtcggttcgccgtcaactccagatgggatgaccgaaccatcgaaaacggcaagggggtcattgggaccgccagctacgattgaatagccaccattagggttgacatcgtagaaatggactaaatcatccgtcagaacaccggcgatcccggtaccattgtggagaaacccgacgtggaagagccctgtttcaggatcattatagtgcgcgcatgggtcgccgatctggccgttgggtggcagcacatgggtatgcggcctccaagtctcaaacaaagacagcgggggtagatccgcgagattcggaggtggagcattgtagtcttgagcagtggctccccccgagatcgagatcaaaactgctgctaccttgatgatattcatgacgaggaaagttagatgagaaaatacctgcgaggaatgaagaactcgttgtacatgaatcgaactgatatttatattctacaagagggcgattttgtctcatcaattatgcaatttaatcacaagagaaatagcgcacattctaatttcaacgacagtgagggggtagccatacatccccatactggggtgatcctagaatgtaaacgaactccccgacaaatttcattttttgggggtagccatacatgtgcatactgagggatcctagaatgcaaacgaactctccaatgctttcattcttcggggggtttaaatgagtggcttgtgtaatctcgccgagacaacaacaatacttagatgtaacgacctatataagcaaagcgaaaggaatgcgagcataccttgcttgatgtatcatattcctcctagagcgacacgaaggtagtattgtcacattcctcctaagatggcaattctaaattatactgttgatatgaggcttacattcaatcatgtacgtgccccggatcagccagactatatcgtatattaatgcgaagcgtcaacttggagtatttgcagaaaatctccctaggctcaagaagaaatctcaatttaccatcatgatcccactccccttggcctacattctgagtccaaatgcaaatactctccggtaaagtcactagtagactcactacaacccgccgctgttgataaatatggagatattgtccgagatcacagttctatagctccaacttgtgttgattatggtctgacaggaaaacacatgtgacaacaccaacatagctctgtttctctggttctcttctgtccatcgatcatccaggaaaatatgcgtattgtttcttcctttcattccgtaatttcaatattagagatcctgcaccttcctttctagttcttacccattgccatatgccaatactctcggcgcgcattcttaattcgactgggtatgaaaaaggctggtgggcgaagttaggcagactatactaacaccttggtggttcttcatgccagggaaccgaaagaagcagagatatgcattagggaaagaaatttctagatccactagtcgtagaacatgcacaacgagatatcatgatattcgaaagctcattccttatgcgttttcaaatcctcgttcgaaaatggaatcagctgaggtgtgagatctggggccctatggaactttttgtcaaagggccacattggacgggggatgcgacgatgcccaagacgctgtagatcttgatcaacaccaccaggagtcaaaccaagcatccagtctgccgccatattaaacagctctggttctagatagccaatcttgactatgacgatatctgatgttcgaggattaaggtcaagaccgttaaagtcactctcatggtgatatggcttgcggaatttggtcaggatagtaaacacacttccaacctgtagcactgcttcgacttcggcatcacgatctccatacctgatggaatgaacacgtccagtcatggtgacaggcccagagtggagattgtccacctgtgccccggcggttaccgtcaccgtggcacccacgccagccttggttataacgtcaattgcttggggtcctggaatactagcatagatcacagatgagcttgattctttagaaaactctgatcgcttgagcagttgatccaagccgaaggtcacgtcgcctgatccaccagcggtaggattatctcctgaatcagagatgaagaaaggcctcttcgaggatgcgagcgcgttgtcaatgcactcggagaaagacccggtcggcgcaacgaaacggaagtctttatggacttgccagaacaaagacgcaagtctcttcgctcccctagcaacagcaaccttattccatccagtgaccattactacagcgtgatttcgtggctcatctgcccacgcatagccaacccatatggctgcatcgaggacatcatccatcgcttcgatctcgggaatgagcgaatacaggcttttagctggttcgttgcgagtcgaagtctgctctcctggcagcaagataggaattgggacccatgctttcaggggtctattccttctcccagtgtcggtttgcgcagtcaaaacatggaccagattgcgacaagcccgctctttgctctccaattcatcctcatgaggtgccatacgataacaagtgatcagatcagtctggtgggccagctctcgggacacattcccatgcaaatccatagatgccgagaccaaaacatctggaccaataacagtccgaatccgccgaagaagctctccttccacatcttctatatcctcaacacacattgcgccatgaatatcgtaccataatccgtcaatggggtttgaagcgacaattccagccaaccgctccagtatttccctggaaagttgttcgaaatcagctcgaaccacgattccacctggaagggcatggcctatgagtgcccccttccaatctgcggcgtctgctagatgagtgccatgatgcagaaatgcgtattcctcgatcacctccgggccacggcgcgggtgaaacgccccaccgagtgttcgagcgggggaaaagctagaggtctcacaagcaaggcctgcgattgcgataactggtcgttgagacatgattcgcggagggtgaagaaattgtgccaattgtacgaagtgtaagaaacgtaaggatgggaagatgaagtaatgttacaggatccaagacaatcgcgtcagactgcttttccccgctctggtgacaagaccatgaggtgaggaaagagcgacattgctgcgcctgtctgatattcatatctaaagagacaagggatcaaaattcaaaatataaaagacctagccactgagtaaatagtacaaaggtagtgggcacggttgtaacatctccaatcaggtgacgcgcgggcagtcgcacaaaagcgcgtcttcccacttgtttccgtcctctccataccaaccaatctaagtcatgagtcaagctaatattacacaaagaccaatcctagagattgcgtgcttcaatcaagaatcggccgcagttgctgcgagagcaggagcggaccgcatcgagtgagtatcttattcatgttcaagctcccggcaacatgcatcctgaatttgttttccttgttgctagatatccctacgttctatcactaattgcagccaaggttatgcaaggactaccacctcggtgggctatcgcccgacacagacaccctcgaacttttgaaatcacagctcgcgataccgatctacacgatggtaagaccacacgcggaaggcttctgttacgacgaatttgactttgaggtgatgaaacgaacgctcaattctctgaagtcctacggggctgacggtttcgtcttcggtattctgaatcgatccccacaaaagccctttgatccgaaaatgtcgtggatcgatgtatcccgtaacaggcagcttgtcgaactagcggacgggcggccctgtacctttcatcgcgcctttgatctcattcccgaatcccactgggagagtgcattggccgacatcatggaatgtgggttcgcttcgattttaaccaacggcggtgcttcggggacaaaagcaaccgactgtgtcgataagctgcaagctctggtccgttatcaaacgcaaccacaggggaaaataaaacttcgaagcaatatagttccagaaatcattgttggcggtggtgtgagggcatcgaatataggcttgctccacagcgtcactggtgcctcggtcttccactccgctgctcttctgggatcggaagaggtaacctgcgcaaatgaggtgtttaagatgaaagataagatatcacgggtatcggaggcagatgaaatggcgcaataatacttccacgtattttgtctgctttatataccgaacataaacccgagcaccatttggtcagaagtgtatgccattttcccaaacgtcttgcagcatttttggcctttgatttgtataattaacatgatgaggagaaaaggaatgcagaggcagcggtagaaatccaagcatcgagggcaagttggttacaacatccatcttatttgtcttcagattttcgatctcggatatgctgtttaccattgtaatcggttatccggctgttccaatgcctccttttcaggtcctgggtgaaatttggctggggttattgcctcaagcaacttgtttccgaatagtccaaaagccgaagcaatcccaccaaatcggaagatctcgctttccatttgactcagcttgaatccgaacgtcttgtcggcgactttgatgattcgtgaactcaaatcgatggagattgacactccatcattcacaagctgaaagaaggattcatcttccattgtgatacccaggagcccgagacttggcatattgcgttgaaagatgaacgaaaacgacttggctatgacacattgaacaccgcaccctagaagaaacccgtggtcagaaaacagacattcgtttcaatggcatcgaacctaacttacctaacagtgccatcactgcttgttcgcgggatgatccgcaaccaaagcccttaccaccaacaacaatgttgaaaccctgctgggctcgttcgcggaatgttggatatctatacaccaggcagcacatgccagcgtccatgttactttttatgccaatcagaaactcagcaggagccaactttaaaaccatcagctctggcatttgacgaatctaatgaaagaataaacactcactgcatccgtgtcgatgaagtctcccagtttctgcactttgccttgaagacttttgacttgtctttctccgtctttatctagccgcatgttctctatgtgcttctgtgtctgggtcgtggcactaggataaccacgagaaccacatggctcaacatatgccaggtcgctcttcgagttggttgtattcaagtgtatacgtgttgttctgagccgctcccattgacttaaatcgatcgacgcaatcagatcactagggtcaactagcttcatttcaaaggaggatgctgcgacagtggctgcagaggcgagatgaccaattgaacctaaatcggatgatctcaattgaccgtgccatgttattgaagagtgttcattacctttacccatccggttttcgaagttgcgattctgcgaggaaatccatacctctcctggcgcggcctggtcggctgacatcccgacacaatagctgcatccagggatgccaacctcaaatcctgcgtctgcgtatatatcacataaccccagttcacgtaagcgatacaatattggcattgaaccgggaacgaccttcctcttcccctttgcggtaggctttaatccccttttcattgcttgttcgattaccagagcaccgaggatgagatcttcctccgtggtagtgcaggcaccgataaaacatccattcagctccattccctcttcttccgtaactggaaccacgtcatccggctttggataacgtgcgatgaaagactccacttttgaaaggtcaatctcatgaactgcggcgtactccgcatcggtatcgggcctgaaatatgccgtgtggcatttatgacgcgtaagttttcgtctactaatgaaatcgtgggtaatttcatccggcacaaataaaccagtgatcccgccaagttcctgtcattcatgttagtgaatttgacccaactgatttatggtttgtgacataactgtggtcatgtttgaaactgcgaagcgggtgtcaagggacaaatgcctgagtgctggacctgtgaactccacaattctgtcggatgctgtagtattccgtttgagcacttggaggatgtataaaatgatatctttgcccccaatccctggcttcggttctccaaccaggcgtatattgatggtttcagggactttgaaccatgtttccccagttactaatggaaaggtgacatccgcagcgccgagtccaaccgcgagacagcctactgccccggaggaacatgtgtgtgagtctgagccaacgaccagcattccgggttgcgcgcgctctcggtagaattcagtgtggagaatagtgtacttcataggcgtgattcagcgattggaaaccccccgacgaaaagagaactgacattgatgccttggtattccgtcattttgaaggttttcttcgctctctcgcttacaccgatcagcgcctgcacttgaggtaattcattaatccggggatcaacaatatggtccccagaaagccagaagcgatcgtttcggaataccccgggttttcctagcagattataggtcgtttccattcccttgagattcacaatcagcccgcagctcacagtggctctagaagcgaacctactgcccaagacacctcagaggcaagtatccaatcaacgtggacacgaattatatctcctggagccacccatccgatgtgatttaaatcatgcatcgcaaatattttctcactcacagtcatccctcggcgaccttcgggcctgtgtgttagaaggcaaggcattgatttttctcggtcggctgaattcagggattcgagccacgcatccacaagaaagaatatttccgattgttgttgtattgtcagagaatcaggctggtttattcctaggcccccaagcatggctggctggtagcagatgccaaggacatcggtcaggacatcgacctcccgttgcttcgtatgatcggtgcggagaatcgttgagatatactccaggttttgcaacgcattgtgtgtggaatgggatgtctctaaaagccccattgtcctactcagaacaggcggctcagaggggatcaagcatactgaccatttacatgtatatgtattccgcgagtctgttctaaaatatgaaccaattgattgagacttgattggttgctttcaggcatcgttcatgatagatactttccaaggtttggtctggtggtcttgaaggggctaaccggtcttaatattcatctagcaaggttatacagaggttgtacagtagaacaatatagtgatgcacggattactcggtcttacaccgctcgaaagcgggtactgcaacaccgaagggatttgacttgcagatgccaccgagtagaacatacgggcgcatgcatgccaatctccaatgctacctttatggcagggtccaagatttgccgcgtaatcctctacgggagcatagcacaactcgtctcgtgatctaaccaatatagaccgcggggtcctcaacagaaggtgcctattgaaccagttgagtagtcaagtctgacattcataaatagggtaacgggcaaggtgaggtatttaatttggactcgacctatcattatacgagtccgaaagtatccccaatcctcccaatctatacgaagtactctccgtacatacagcacaaagatatccttgtatgtacatatttacatcatgcatcgtgccgttgaccaatgatacatgagtacacactagtacccgttgacggaagtacatgattcatataaccagccaatagcagatcccgcggggagctgatggttcttccgtgtggggaaccataacgccaaggtttcaagtcccatggttgacgaagttaggcaagccacgagagataatttgccgtatccgcggccaatcagcaatctccttgtgggctccacgggtttttaatatgatcctgaacccgtggacctcttcagggttccaacactttattattctcttctctctctttattctacgtccacatacaactgttgtatattgtcctcctcacgccttttgcttatcaaaacagaacattatagagagagagaagcaatatggaggccatcgctgtggatccagacttgtacgcccctgagagttcttatagccccgatgactggcagtcgtgagtttgcatgtgattatccatcttgtacttcagattttcctcacgcgtcattagggaaactacctcgattgggtcgtcaatctatcgtggtttgatggataatgggagacggtaagagcttcacagattggatcacatgatgatctcacataacctcacactcctatagatatcaatcgctctccaacaaagaatactggtaggtagttggaattactcacaataagaataaactcatctcaaatgtagtattccatccgatgagcaacagtttgagacctacgaggcagggtacgtattgcaatcccagtccagagccggcctctaactatcgcggcagacacctcgtggatctcattatggactcagatcgagccaatccactgtttcggtcacccatcgggaccgaccgagaacgcccgctacaggttctcgatattggaaccggaaagggaacttgggccatgtacgtctgtagaccgttccgacctcggtgaaaatgtttagggcttatcattcctagcgatgtcgctgatatgttcccaaatgccactgtccgaggggtcgaccttttcccacctccggttacctggatgccacccaattgcgtcatcgaggtcgacgatgtgctgcaagagtggacatggcgcgaacaatttgatctgatccatatgcgcaatatgatcggatcgtttgactctgctgagtgggacattgtttaccagcactgctttgagtaggttatcaatacaacaaagtgtccggcccaatctgactgcataacagcaaaatggcccctggcgggtggatcgagcagatcgaggccggcccttttatcacaagtgacgatgggagtctcccagccgacagtgccttgtcctcgtggggtccaattatacaaaagtgcggtgatcgcgctggtcgctcttgcgatgtcgtccttaccatgtcggatagcatcaagaacgcaggttttgtggatgtgcatgaaaaaatctacaaatggccaattgggccatggcccagagaccaaaagttcaaggaggcaggcgtggtcaattgccaacactggatgtctggtatggaaggatggtgtatgtggctgctaacgaaatttggtgatcccgagccgtggactaaggagcaagttcatgtatactgtgccaagatacgcagtgaactcaaggacccacactaccatgcgtatcacaaagcgtaagttctgatctgtcatcgctcgcgtcgctcacaggccaaactgaccaccagtataggagaagagtgtgggctcgcaagccgatgcctggtgaagtcccgcctaggtcatcaaagtccagctccagttccgctagggcaaaaccatgaacccatccgaggattcacctgtcggataatgtatcaggagtggacgactcgccttcctcggtcttctctggtcctctcgaggatcggtttgttgcttcgtttgtatataaatgatgcccgtcacgagcgagctatgttcctttcgtcataatactcaccgttcaccctctgctacctgctaatttagacctatacaagtggtggttgttaggacaaccaagacacgtggggggaagatgtagaagtccatatacataagctgattaagcattgtgattgcggagcgaagcgaagcaattaaattgtagtcacataagcactgatcatcaatgagctctctgatttgctcacagagtacgaccagagtggaaggttgaacgcagctacatcaataaaatgcagggaattaatgaacacgctagttacttatctccttgtttaagaaactgaacaaatcaatcagtatattcatcgcgtggaatgcgttgttgaaatatttcttcaacactcaaataatatttgcattttatcgttcatcaaaatcatgcctttctccagcaagtgtccttacatcataatcttcacccagttgatcacctcatctttttgctgcctgcaattattgcccgtgttttagatcccgcctattatctcgtgagtgggactccacgtctactcgagtaaacggccatgtccgtgtcagatgttcgattctcgtgcgggttacttcagccggatggctctatggaagccgattggctcgcagcacagctcatcttccctggtagaatttcctacttctaaaagtggctgtatatactccgtagctatctcatgcattaagacctagattggcagaacagcccccagcccctgtttatcagcacaccgctcttcctctcgtcattcttgtgctttatgaagttggttttcttctcctaacagctgttctactgaatctactctattttcaaacatttcgaacgcaaaaccacggctaccagcgatatggattacgaggttgaacaagaaatcgtcgcattcttcgacaagactacgacgactcactcagcctgtgataactaagcgagtgagcatcttggtggaaatgtcactccagtcgacgtgcaaggcgtgtgtagctacaccgtctatgctggccctaacgccggattcgtcgtgcagtatcgtctgaagtccctagcactgaacatggacattatgaatctcgtcaaagccatttacggtaccttgacaccccagatctccttcaagggacagattggggataatcatgagattaaagaaccgctttacatatacgttatgaaccgaatgctaggcatctctcaactggattttatcctagcccataacggtgatgtacctaaaaactcgctcgagttctcccgctagcgccaaaatcttgtggccgacaacgcaaagtgattcatttctacgtgatatatacagaattgctgatcatatgtcttactatgtagattctttgctctattttgaaaaggtcctcaggatgttgatcaaacgtaccgcgagagcctgtgccatcagttcaaacgagacctgaatttgttacttgcttctctccccattcgattccatccattgatcaagaagtctcttgactcgttgccggccatcttttcacttcctttggtgctactacacaatgattttggttccttcaacatgctggtgaacgaaaattcttgcaatctgctcggcatgattgattgggccgaagctgagattgctccattcggcataaatctctacgctcatgatcgtttgataagatccatttgaaacatggctggtccaggtatgatgattatcgccttttggatgagatattctggagcacgtttagtcaagggaccggagtggacaatgaaacaatcaaaaccatcaaagctgcaaggattgctggagtactgttgtggcttggcttcacaagtcgtcttccgaatgagccgaagccagtaccgattcctgatgatgatgaaagtggagcatatggcatgcgtgatttagagcttttgattaatccagctacgaggttcacggacttggtatgataagatgaacgtgtgtctagaatggcggccaagcacaccaagcatgtgtaccagtacggcagccgaaatgggccaaacggaatgcttagtaatacatattatatcatttttaccgctggagttccagcgtttcgcgcaccggggagtcgagtaacgttatgttggtgttcagttcgcatgcgcctccaaggccctcccagcagccaaacatggagtacgtcagtgcgcgctggagaagaggatgcgcggggtgggatcggcatgacagaaaatgtacggcccaatccaaacccttcaaattcaggccgggctgtcacgaagtccgtgagagggatggtgaagtattcgagatgaggagcaacggtataagccatcttgatttgagtagtgctgatgttgtcttaccttccccgccaggcaacccctgagctgttttttttttttttggaaaaaagtgaaaagaggagaataccaactacaaaatcatagaataagatgtaatcttgtgatattgccatttctacacttccctgtaagatttcaatctatgtcgtatgagtcattgtatttcatgatgacaactatagatgtatatatatgttatatacattcaaatcctgaatctattttgattttgatatttttctctcggtagtcccatggcctagaatattaacctagaggtatcacaaaagggtcgctgaagggaatagtttaatagtctgatgtgggcaatatgaatcacagaattgggtgagaatcaaatgtctcagttgaagacaacagtcttatggccgttcaagatcacgcgacgctctgtcacgtacttgacagcagtggcgagtacgttgctctccacgttgctgccggcatgggtcagctccttggggctcatgccgtggttgacccgaacgacattctgttcaatgatcgggccttcatccagatcactagtgacgaaatgagcagtggcaccaatgatcttcacaccgcggtcgtaggcctggtggtagggcttagcacccttgaaagagggtaggaagctgtggtggatgttgataatgcgaccggacatggcggaacatagggttggggacaacacctgcatataccgagccaacacaatcaaatcaacgttgtgttggctcaccaattgcagaatctgggcctcctggtgcgacttggtctccgcggtgacgggaaggtggtggaatgggatgttataggtggccgcgagggtagcaaagtccgggtggttggaaacaattaaaggcacctcaatgctcagctggccggtggattggcggaagagcaggtcgttgaggcagtggccgatctttgagaccatgatcagcacgcggggctttttcgcagtggggttgatctcgaagttgagggagaacgactgcgcagtgggctcgaacgcagtgcgcaatttctcgagttcggggacttcatctcctccacttgcaagcgcaaattgtgtgcgcataaagaagcgctcagaggcaggatcaccgaattgcgacgaatcgataatgttgaggttgttctggacgagaaatgcagtgaccgcgtggacaataccaggacggtcagggccggacagggtcaaaatgaagctaaaagccataataaatgagagaacggtgttgaatccgctgatgttccgttgaatagttaagaggatggagaagaattgtcctggtttcttttcttttttctcttttttttttgtgaatcccactcccaatgttgccggtttcggcgatgactcatctgctgccattgcccgccttcggcttcttcttttgtttactttgcgcccttttgagcttcaatcatcactttgatctatgtgatctcctgtccttgatctacagtatcatttgggctcaggatcgacaacgaaaacatctcagctcgatcattttactcccccatgcgtcggattccatctttctagccaccttttctctcgcgcgacgcaaagccactcggcaacaacattatgcatcgatctcacctacccaggtgtcatgagactagaactgcgttgctgacaggcctgtgctcggcattggttccttgacccccgtgattaaaccaagttatcttcacgacgctaatgcatcccattgcacttccacgagccagcgtgcgcagccaacacaaattaccgagaactggggaaaaggctaccccgtatagaccctagatctgggctacggtagttactattttgtcacggatttaagatttttgtttaatctgggtgtgctaacatctccaagtcgggcgtcctacccagcatggcgttgtctgcctaattcggaggctagccatttagccgccaatgcgtttccatacgatgtgactgtgttgttgggggctatttggcgagccgaataaaatcgtcccttaccaagcgatgggaatgttcacagccatctcattcgcaccaagaagccgcctccacaaaatgataccaactacatccgaagccagtcgcggggggctccctccgtgtccccggagtgtttgtcgtacttctccattgggaagcacgatgaattgtgacccttgctagttcctattagaatataaacggactatgtatctatctgattcttaatttcctcatcaattcacccggcaatcaagacctcatcatggcttccactctctccaatttttacaaagatgccctgctgttggtcgccttgctcagaactgcacaggcacaacaggtgggcacaaacaccgctgaggttcacccatccttgacttggcaaaaatgcaccactggaggcagctgcacttcccaaagtggcaaggttgtcgtcgacgccaactggcgctgggttcacaacactgccggcttcaccaattgctatactggcaacgagtgggatacaactatctgcccggacgatattacttgtgccactaactgcgccctagaaggtgccgactactcgggcacttatggcgttaccaccagtggcagctctttgcggctgaacttcgtcacccaggcatctcagaagaacattggctcacgtctctacctgatggcagatgatagcaagtatgaaatgttccaactgctcaatcaagagttcaccttcaatgtcgatgtctcgaatcttccctgcggcttgaacggtgctctctacttcgtatccatggacgcagatggtggcatggcacgataccctgccaacaaagccggtgctaagtacggcactggttactgtgattcccaatgcccgcgcgaccttaagttcatcaacggccaggccaacgtggaagggtgggagccttcttccaacgacgtcaacgcaggtactggcaactatggttcttgctgtgctgagatggatatttgggaggccaactcgatctccactgcagtcacacctcatccctgcgatgacccaacccagactaggtgcagtggagatgcttgtggtggtacatacagcaatgaccgctatagtggtacttgtgaccctgatggatgtgatttcaacccatatcgcatgggcaaccagtctttctatggcccgagcaagatcgttgataccaagtcccctttcacagtggtgactcagtttatcaccaacgacggtacatccactggcacgctctctgaaatcaagcgcttctatgtacagaatggcaaggttatcccccagtctgtatctaccatcagcgctgttactggcaactctatctccgactcgttctgctctgctcagaaagccgctttcggggacagggacgtatttactcaacatggtggcatggtgggcatgggggctggccttgctgatggcatggttctggtgatgagtctctgggatgaccacgcggccaacatgctgtggctcgacagcacttacccaaccgcctcttcttcgactactccaggtgctgctcgtggtagctgtgacatttattctggccagcctatcgatgttgaagctaacaatgcgggtgcctacgttatctattcaaacatcaaggtcggtcctctcggttcgactttcagctcgaccaactcaagtgggacaaccaccacagtcaccaccagcagcaccaccaccaaggcaaccagcaccaccaccactactacatcaagcaccaccggcgctcctcaatatgcgcagtgcggtggaattaactggaccggtgcaaccacctgtgccagcccgtacacctgccagaagcagagtgattactactcgcaatgcctgtagatattaggcaaccgctagtgtgtagtggtggagactcggaaaatggtgaagataagaaacgattggatcagtttctcacgctctttgttgaattgatggttttggctttgcttgaattcgagagattgattttgcgttcttttaaattgaaatccgtatttgttttctattctccgatctttctccgtatataatatgcaggagctcttaggtataaccatcatatccccgttcattgctttgctgctcgtctttcgacacgcagggcttcaaacaaactttagtcaccaaattgagcatcggcgaaggattattaggaatgaggatgatttattcggctcccttgtgactccagtcaaagtcaacagggatttgtagagcctatttgatccgacgaatgcaatacgtgtacaaaatttggtttatgcattcaatcagcattgcgcactcgagaagcgcctaacgtacaagcgaaatccaaccctgcttaactagtcggagcagcctccggtttccgtatggcttcttcaagatgaacaaggtaacgccacatgcatcagccgggtctgggtatgcggggtattccttgcaggggttatcggcttacattgttcagaaaccagtgctgcagttgcaagcccgtgagatttgtcggataaatgaccggaaacttgggcagtctgacaatcgtcaggctcttggctataggtactgtactgtttgtcggcaatatactcccatatccatggagtactgtaaattgattccattttgctttccagcttttccggtgcctctcgtgtctaagctccttaccccgtcgcctcatatccgaaatgccagccacggagagattgatgccgtgccgaatctggactacatttctctcgtatattagcgattcattcttattctagctcgggtggcggtccgcaaaaagaaatcccaaattgaggcctcgaagacgatccccgcagacctttctcttaagctaaagtgtttccttatacgtaagaacgaagcttcgcagtctaagtcctaggtaggcagggagcttgctccttgtcgttattgttcattgtaaacttgatataaatcctattataactcctgatacattcacactgcgtagcagcctcgacaattccatcacctagtcaagatgcggtttacctctttatttaccataaccggcatcacaggcctgggactagcagtaccagatgcggtggaattaactggaccggtccaaccacctgtgccagtccgtacagctgccaaaagcagagtgaaaactactcgcagtgcctataggtgaagcagtagagcaacaagacatcgggatcagcggtagcttgacgagggttctacattgttgataaaatcaaatgttcatacatacttgtagatctggatggctctggtaactcaatgttgtacagatcgtttgttaggagtctcttcgtgttttgttctacacagcaacattccacttcatctctctctattgcagagtagcaaccagctcatccacggttttcatctcgcgaccgttgttctcgccgacgtccagtgcaaccaaaaaccgactcacacagttataaccggcgatgccagtggtgagctccacgatctcgcggtcatcgtacccgaccgtcttcaattcagcaaaaacagcatcttcaactttaatggtgcgagtcatttggtcggtatagcgtaaaacggcgcgctgttgtggggtgagtgcgctagtctcaagctcggaaatatctccctcggcggtacaaggcagtgtgagagcagcctgcaattgactgggcttgataccacctttgagagccagtggagcgtgggcattccattcgtaaacagcgttattgagtacagcgacacggcagactgccaactccatgacaccagagtcaaccaaagtgcgcgaccgaatagctccgatgaagctgttccagccatcggcgacaggtgggctatggaggagggataggtcaagcgggattaaaggacgggggtttctgcgctccgcgatgcgggcatagatgtcggcggtgtcagggtgcgcatcgacaggcggggtggaaggggcgtaaggcagacgcatggtgcgtgtatgattgattccgagtgatatggggttatgtttgaagatggtgtatctacgctgaaacacgtacattggagtccgttttcaaagtattatgtttttttcaaacctcaacagttcaaacgcgggggcgggaaatgtcttacccgcccacgtgggggagtgtttctccggcatcatataggtcttcgtaggcatcacttcccgattagaaatgtctactccgtactcttcaggcttgtatcgaaatgagaagtcggtttattaatagtaatagatcaggctgagttcatattctcgccgcaaacgagctccaagtcactatgaacagtctcaagagcaatttgcaaagttagtatgttgtacaacagatatacttggacgctaccccggattgcggagggcactcggagctttgaaaacgtggtgggcttagggcttaggtatttcaaaaaattatactcatactcacctggaaccctcaaattatcagagaacaaaataatggcaaacttgatcccaacaccggcactagagtaaaaacatactcccgcagggtgccgcccctcgatgccgatatcccccccgcatgcggataacattgaactttcattatattgaagttttcgccttatacatgatccgttctgttttctctcggccatctgcaatctctcggtcattttctcactcctcaatcgccaatatgaagcatcatttgatggtcggtacctggactgcccccggacgtatctataccgtgcaattcgacgacgatgcccttacgctagagttggtcaaaaataccgagattccagaagccgagcccatctcatggatgactttttctcacgataagaaggcgatatatggcgcggctatgaagaagtggaacagtttcgctgtcaacagcccaacagagatcattcaccaagtgtcgcacccggtggctggtcaccgtatgtctacggagtcaatggaatacatgtccaatttaccctcgctaactctttcttttgtttcgcgctagctctggctcccagcagcgagaccaacactcgtgctatcttcgtgcttgccgcccacaagcctccctacaatgtttacggcaaccctttctacaactacgccggttacggtaacgtgttttctgtgaagcccgacggaagtctggatagcaatatccagaactacgaatatgtccccaacactggtatccacggcatggtgttcgaccccacggagacgtacttgtactccgccgatctcacggcgaataagatttggacgcacatcaaggaccccaagacgggcgaattgacactggtggattgcctcgaggctcctgatgccggcgaccacccccgctgggtcgagatgcacccgagcggcaagtacctgtacgcgctgatggaggcgggcaatcggctggcagtctacgtgatcgatgagcgcacccacaagccagtattcactcacatcacgtatcccttactgccttccggtgagtttcgacaaatgcgaccgatgttgatggtaacaactaactcattaggcctccccccgcgtaacaagtatcgtggagatgtcactttttgcaccaagggtggagagtaccttttcgcgactactcggtcaaaccatttcgatgtgactggctacatcaccgcgttcaagctcggctcgcatggcgagatcgagcgccagctctttatcaacccgacctcgaccagtggtggccactccaacgccgtcagcccctgtgacttcagtgacgagtggcttgcgctgtgcgatgaccagcttgggtttgttgagatgtaccgctggcgtgatgagaagttggcacgcgtcgcgcgggtggatatccccgaacaaggatttggtatgaatgccatctggtatgattgaacgaagaaattagaataaatgaagatcaacatgtagagcaaaagattatgtacagtacacaaaatagattggtgtaaaaaaagacaaaaagccgaaagggaaatatcgtcggcagtcaagttcgggttctgctttcacccggatgagggcgcaattcgagtgccgatgttctttatgttctggggatcctcttttttcgcattttcgcatctttggctcctttctctgtattgtctattctggatttcctttagctcttcatcatgcctactcccggtcttctctacgtgacaatgcagcccaagggctcgctaccggacacccagttccacgactggtataacactgaacatgggcctctgcgtctgcgattgccctttgtcactaatggctttcgtttccgtgccacagatggagaacagcctgaatatgtggctttgtacgatattaccgacatggacgagttgacccgcaagacctacttggatctgagaaccgatatgatcaagactgagcgggagaagaagactatggcccaaattgatgtcggccgtttactgtatgatctagtggatgagcgcagcaacccgaacttccgcccgctagaagatcaagccgatacggatgccgagacccggggtagcgtcctcgtcgccgtccgagttgccactcaccccgaccccgccaaagaagctgacctggataaatggtaccgcgaggaacattttgagatgctctctcgtgtgcctggatggcgccggagtcgccgttttgtcactgcggcgatcgattccgccgccccgcgcgaatcgctgactctccacgagtatgcccccgtcaatggtcttggaggtgaggcccacaaggccgccatgaataccccatggggatcgcgtctcatgagcgaggtggtcacatctaagaagcgtcgcgtatatgagtggtactacaccttcggccctgctccccgtgagctcacttcgctagctgccccagatgtcgttggtccctggagctccaatgatggccgtactcgcacatttccctcgaccacccgcccagctgtcgagtcgttcatcactacttctgatggggttgagatcccctacaggctggagggtagcagagacccctacgcgcctgtcgtcgttctgagcaactccatcctagtcaactggaacatatgggatcgtttccttgacgccttctttgctcagcaacagaatcagcgttaccgtgtcgtgcgctatttgactagaggccgacgctcgcagagtggtgagcagcctgtcaatatcgatttactggcctctgatctggctacgttgctggaggctttgcgtgtgcctcccaaggccgctcgtttgattggtgtcagcctgggtggtgtgaccgtattgaacactgctctccttcacccggagcgcgttggagctttcatcgcatgcgacaccaactcctccgcacccgaatccaaccgtaaggcatggggtgaccgcgtggctatctgcgagaaggaaggctctaccgatccagacaccaatgagcccattgttggcgaagagttagccgaggtaaccacccgtcgctggttcgtgccggaatcataccaggcccagcccgaggtccttgcgcctgtcaaggaggctgtgcgcaccaacagcttgaagggatttgcccatagcgtgcaggccctctgtgcctacgatatccgtgagcgcatggctgctgccactgtgccaggcctgttcatcgctggagccaatgacggtgtcctacctcagacaatgcagaagatggcagcagatctacatggtggcgccgaactgaagctcatcgaccgtgccggccatctacccatggtagagcagcctgtggcattcgagaaagttgtgactgagttcctcgggaaaattgatggttgattgcatttctataggtcatgtgtagatagattttgttcgggcgtatgcaaggaaatgactgatgaatatgttgactgaaccttcgccagtgagacatgactgtatcttcccttcaagtgcgtgcttgtatagagtattgttcgactgatcaaatcataacttcggatccaccaatgtgtatgtacgggcatgtgcgtcagatgatctccgggcttccgttgtatggtaaaagcctgaatatattgtccagaggatgaggatgcttatgcgggagggaagggtgaccggaggctgggtgtctttcgaagtacctcaatgaatattcagtagaccgaggtccaaatgtcaagaaaaatctcaactatgagctgtatcacagagcattgttgagcacaatcgtaaagaggagaagacgaaatgatgagaagaaaaagttgcagagctgaacagttcggcagacgaaggcggccaagggtgaaattcagcttgcggggggaaacgtcacacttctccttgacgcgcacttttctacacgttcttcttctccgctctctttcactgtttcttcaattattcctttctatcatgcctgagagcaagattcctcaaccgggtcctgccaaactgaagcgcaatgcgggccctgacgagtggctggaggcagcgaaggattgcaagtatctatcggagccacatatgaagcaactgtgtgagattgtcaaagaatacatgatggagggcaagtgctattcaacctgaactcagttctattattctaacattgttcgcagaatcaaatatccaaccagtatcgacacctgtcacagtctgtggtgacattcacggccaattttacgatctcctggaactctttcgagtttctggaggcatgcctgatggtacagaactcgatccgccgaagacatccccctccgtgattacctcggccgatatcgaacctccctcaagcatctcagatcctaaaattcgcaagaagcttcgcggctccaacatgaactccaacgacgaggaagattcgagttcacggagccgatcggccagcggtacatctgcagatctccagcttaaccgcaactttgtatttctaggcgactacgtggaccgtggatacttcagtcttgagacattaacgctcttactctgtctcaaagcgaagtaggtcgcacatggcacctcctggcgggtacgtgttcactgctgactcaatatcctagataccccgatcgagtcacactggttcgtggtaatcacgagtcgcgccaaattactcaggtatacggtttctacgaagaatgcttccaaaaatacggcagtgcttcagtatggaaggcatgctgccaggttttcgatttcatgacattgggggctattattgatggcaaggtgttgtgtgttcacggtggcctgagccctgaaattcgcacattggatcaagtccgcgtggtagcccgtgcacaggagatccctcacgaaggtgccttctgtgatctcgtgtggtctgatccagacgatgtggagacgtgggctgtcagtcctcggggagcaggtgagaatcatctaggtctttcttgaacacgcagctaacaattttaggatggttattcggagacagagtggccgatgagttctgccatgtcaatgatctctcgctgatcgcacgcgctcatcagctagtgaacgagggctataaataccactttaacaaccaaaatgttgtcaccgtgtggagtgcgccgaattactgctaccgatgcggaaacctggcctcggtctgtgaaatcggagaggatctcaaacccaccttcaagctgtttagtgcagtcagcgatgaccagcggcatgttccagtctcgcggccagggcgcagcgagtactttttgtaagatgcgatgcgagttctgcaccggcgctggcgttcggtttgatatttgggcggcaggataagcattatataatgatttagaccagacttaatgatgcatacgccttgtgtttatgagaaaccaaaagggatcatctcaagctctagagatctgaatagagaaccggcgttccgaaaacttgatatcccttgaagagcaaccccgatcaacctctccccgcgctccatactatgggaagcaacgacatggggtaaattaaaacaagggttcgcaatatcaacacggcagtcaccaggggattgactgccgaggcttctcgtccagagcgattgtcccgcaattgcctgccggggcgaatcccgagatccgggggatctctcccaggtgcaccataaaagatcctagatatatgcactcgctaagtgcatttgatctcaatctgcgcgcacttatacaatggagaaagtcgatgttctcatttgcggcagcgggtctgccggtctttgcgctgccacttggctcgccaagtatggggtgcggtgcaaggtactagaacggcgggatggtcccatgaagatgggccaagctgacggggtacaatgccgcaccgtggaaatttttgaaagcttcggaattggggaggagcttcttcgtgaggcttaccacgttctagaggtcaacttctgggccgacaatggcacaggcgccatcgagcggacaggctggacggcggatacccagccgggtctatcacaccaacctcacgttattttgaatcaggcacgtatcaacgggctcctcatagacctaatgcagaaatataatgatcaacaaatcgactatggctataatgtgaccaatgtcaaagttgatagcaccttcgctgaggatcatgatgcctatcctgtcaaagtcactgcggaaaaggatggaaagacagaaatctttgcagccaaatatgcattggtaggtgctcattatctttggggtctagacgttttctgacccgaccatcaggcttgtgatggggcacacagcattgtccgcaaagccctcgggtataaaatgatcggagacagcagcgacgctgtctggggtgtcatggacatggtgccccgaacggatttcccggacattcgcaagaagtctactattcgctcgaaatcagggaatgtcttgattattccccgtgaaggcgatagcgataacctgacaaggttctatattgaacttgctccaggaaccaacccgaaagaggtgactctaaataatttgcaggcccaagcacagagcatcttccacccttacaaggtagaatttgtggaaacgatttggtggtctgcatatgccatcggccagcgtcatgccgatttctttcacaaggatcaccgggtctttctcgctggtgatgcttgccacacccactctccgaaagccggccaaggtatgaatgtcagcttacaggatggctacaatattggctggaagctcggggaggttttgactggtctagctagtccctcgcttctagagacttacgttatagaacgtcaaaaggtggccgttgatctgattaactttgaccgttacttttccaatttgttttcttctggggcctcaacatctcctgccgagttccaggaaggcttcatcaagtctggcaaatatacagcaggtttaacagccaagtatgaggtgtcgtccattacatcttcattggaatcgaccaacctcgcttctaacgtggccgttggtatgcggatgcccagcgcgcaggtcgtgcgattctgtgactccaaacctctacatctcatgaaatctctcaagtcagatggccggtggcgtatcatggctttcgtgggtgacctgactgtaccagaaaaccacacaaagctcaaccaggtatgttggtcacttccgaaatgtacttaagccttatctaacgtatcgtatagctgggagaatacctgaccgtggcggatgggcccatccagacattcactcctgaggatcaagacattgacagcctgatcgagactattttgatcgggtatggaaatcgtcatggtattgagttggagcaaatcccggaatgcttttatccagtctctgggaaataccaaacaagaggtgcatattctctaatatcttatggtcccatcattcctaacccagagtatttagatctacacaagatttattacgacgacgagagttacaacaatgggcacggccatgcatacgagtatctcggcattgatgcggcacagggtgctcttatcattgttcggccggaccaatgtaagcaaatccgtaatcgtgagataactagatacaactgacgctttcaaatcgatagatgtttctgctattattggtctaagcgattattctgaaatcggcaacttctttgctgggtttctccaacgtcaaacgtacgttgcgaaggatacgaaggacacacctaaataacatgtacagtagggccatgaattccagctgtcaggcgtccagcccaattgcagacatcatggagaaacatggttaggttgaaataaatgggaatttgagtggagtttgcaaactttgaatatcattaatgtgctcaattttcctgcggagggtattgtgattcaaaggtcggtctatatcgaagctgcttgaaatccgtacaaattgcatgtgtcaggctatccttaccaatggggcagactatctagtcctatttgtgtagttgccctcggtctccgacacctatcatccgatttttatcctgatctcacgccgagctcacgttacattgagagtcactcatgtcttccaattcaatctagacttattccctccgggcttaacaaatcttcggagtaaatgttattataaacgtcgatattaaaacctttttatatcaaatttcccttttcgttttggtactcggaacagtttcctaaacactaagccggactttcactatggaggtttctgttgtcatgtttgctgctattctactggccacgtctatcatcgcatctcctctctcctctcggctacagacagacggtgagatactgcgatcttcccaagctctgcgccgcacgatccagcctcataaaccaggcaccttagaagtgctggatctgaaccaaacgtcccacgagacttacagctccaactgggccggcgctatcctcattggtaccagatacactgcggtatccggagagatcacagttcctgtcccccaacttccaaatggtgctgatccttatacaaattactgcgcctctgcatggattatcatcgacggcgatacttgcagaacagccattctaaaagctggaatcgatttctgtatccaaggaggcctctgttcatatagcgcgtggtacgaatggtatccagactacgcccatgactttagcaacatccaaatttcggctgaaaatgtgatcaaaatgacagtcgatgcaacttcgaagagttccggctttgcgactatcgaaaatctatccacaggcgtatctgtgacgcatatattccccaatagccttggcggtgacctctgcgagtccaacgccgaatggattgtggaggatttttctgtaaagaacgcattggctcttttcgccaacttcggtactgtagtattctccaatgcagttgctttgcgcggtgggataagttacggaccatcgggtgctcccatcatggacatctatcaggatcgaatcctcacatctacttctgtcaacgacaacactgtcaatatcagttatatctagttctgacaatctctagaacaatccggtggaacattgaaattttataacagaaatgaaatagaagttgcctacaatgacctcggcataaaaattacatcgtgctttctatgcaatgtatgtccatcccgctctagtaactcttatcaaacggttcacggatatcaagaacgtgggcagcttttccctgcagacatatctaactactgactgacgcgatattaggaatattcatgtattaacaccaatatggagagaagaagccagctttcttcgattaaaaaatggcatttacctgtgataaccgaaaagagggagattggggacacacaaagcaaacccatcgcataatttattatttaaaagttggatagattattgttgtccccatttcttgctaatttggctaggtttaaaacaataggtgacatcgaattctgccattaaactagaaatgttgtatcatggtcgcacaagtctatccagacgaaagagtcgaccttttaggatcatctggcatttgtattccatgaaatcgccagagagcatcacatatcacatcgtaacaagccccgtatcgcacaaccttcattgtgctaaaatcgatcatggttgaagaggctcgtggatggtgaaacttttgtgtcccataatcaacgactatatctgccacctcgaggatttccggctcaatgccctctaccacagtctttgttccctttccgctgatattggccgaagatcccatcagaggaagttcctctatagcagcaagtcgagataattcttctagcaaaccacccccgttggctaacattgctaaagtgtccccagcaacgctctgtgctaatgcgtttggcggaattttttggataatcggatggtcagcgcgatatggtgcaatgattcctagaggaaggtccaagtccacggtcaagagtttgaccataccggcttctttggggggaagaacatgaatatctcgatgcagattgtagcttccgaccattgcatgtcgcttgtgtggttcccgccgtttcgttcgaaagattcggtccaatgcgtccgggttgatcgcgatgatcccgtagccaacgctcatcggaataatcgcaataccaccccgtttcagaacttcgaacaccgctctggcatcttcttttgggctcggtactttatagaaagacatgatcattgtatgaaagatttgatgtatttgggcatcagagcttcattctagtcatgacaagtggattaaatctcatttaacaatatgtccaataccgagggaaccgagatatgtaacacaaaacacaggaactcatgtgaatgaaagtgtaaataatctggcttgatctcattcccgagtgacacctgcaatactactcttttgcttcaggtatcaaggagccagctcattcaatgttcacagaggactcgttggaaaggaaatcccctcgattggcaccttcgttatctctgagttgggatgtagtcacattggataattcagttggccacaccgcatgccaagttccctgtgcacgaacagaatattcatgtcccttttcgaggcctggaatcggcaaattcacagttacatcaaggctgtgtcgcgcttgtatctcaacgagatcatcctcggaggcaggtagcttgcgtgataccataatagtagggatgggcagtttccgttgggccgttgtgtcacaaatctggaagacaccgagaacaccagcctgagggtccaatggactgccccatcttagaatggtgactggtgtatctgcggcattgtgaacagaaactttgattggtagagcaaatgaatcttgtgcttcggagattggtgcctgaagggccacggtgacctgtaaactcaagtttgacatagttgcgaaaaagtcgtttccgtgatcaaggtgcgaggagaataatagaatagacagccggcaagttaccagtagtatcgcgggccttgggttgttgaaagaccagaggagagaatcttatcacgccttatatctggaattgttgataatgttattgatctctcatttcaaccaatcaaacctgttaattctatgccaagccgactgggcaggccgctccgcattcctccggggctcccgtgcaatacactcctttctcgtagacttggcaccgcttctcgtcccaaacgggcccttcatcacgatagccaagcctctatgatgttaccccaaatagctgacactaagcactatttctgaagtcaagacttcggcgccgtcttgggtcgtatcttggcactgtcttggcaccggagtccggagacaaacgcacggtctggggcttggcgtggtttccggatcgttcagaatgatatgagctgagctgttacctagtaggttgtatcattatcataggcaatttgtgttgatgttcctatcgtacaatgtctttgtgtctcacaaatctaacaatggtggtgtacatatatttgtggtatattcccccacggaatgatcttactttcaaaagttaataccttagtttgtctatatatatctcaaacacaaaggtttacatagagacttgcaacttttaacgccaagtctttctttgtctagaaccgatcgtgaggagttacatcgagcaagccctcgcctgttgaagcatgatgtgggatcaaattgcagtttcataggctttcagacatacgatccatccttcaggggaacggatttccgtcgggccaaggacaacatctatgatgatcttctgaagatgcagctgtctcaatatatctctaaccagtgacaagattgcggacggcctgcccccgggatgttgttatctcacgatacattcgaccagtgacaagattgctcgcaagtctcccgtgtccatcctatgcaagcgtggcttctggcgtgatcagattgtttcatgcagagaggtaaccaccctgtttcttccgccatccttctgggcaacgcggggagatggaaggtgtacaggagagaggagaccgcggcattccattcaaaacggcatcatgtgtccagtggctataaagcaggcgttcttttcttcagaattgaatctttcttattccagcagcatccaagatatcagacttacaacttcatcttcttttagtgaatcaaccttttgacatccgagcatcatgcgttttactgccctttccacggtacttctggctctagcacagcatgtgcatgccttgccagtcaaaaccaacgagacttctgctctcgatatcaccttgagtcgtgtcactgacacccgtatcaaggctgtcgtgaagaactctggcagcgaagatgtcacatttgtgcatctcaacttcttccgtgacaccgcaccggtaaagaaggttaatgtcttcaagaacggtatatgaaatttctccagaccttatcagtttaaagctaatttaatatcagatgctgaaatcacttttgagggaatcaagcgccggttcgccctcgagggtctcgctgaggaatccctcacctccctcgctgcaggagagaccttcgaagatgaatttgacattgccgctaccagtgacttgtctagtggaggcccattgactcttcgttccactggcctcgtgcccctggtcactgatggtacagtcactggatatctgccataccgttccaatgatctgaagatcgaggttgacggtgtcaaggcatcccgagtgctgaaggctatcaagccgctagatcgccgtgctcttcaaacttgcagtaatgcaagcaagaagtctgcacttgccaatgctcttaagaacaccgtgacgctcgcaagcaatgctgcagaggctgccctttctggatcttccactaagtatgtgcataccgttctactaccaattaatcattctaatagcctcccataggttcaatgagtacttcaagactaccagcaccgctacacgcaatgtcgtggctgctcgccttcgggctgtggcaaaagaggccggctcggtgactgccactaagtactactgcgaagataccttgggatagtcagtaccccctttcgataaaaacttgacgtgcatatgactaacaaatgtaatacaaatagctgcgaaaccaatgtcttggcttacactctgccatctcaaaatgtgatcgccaattgtgatatctactacagcaagctcccagcattgactagcacatgccacagccaagaccaagcaaccacaactctccacgagctcacccatgctcctggcgtgtacagcccgggaaccgaagataacggatacggatacagcgccgcgacagccctcactagcgcaaaagctgtgttgaacgctgactcgtatgcactgtatgccaatggttagtgttcgatgttgagtccgtttgaagaaaatcagctaatcagcaaacagcaatcgcccttggctgctgaatggtcaattctccgtacaattgctcccgggggtgacgtacgaagaaccgggatcaatttgagttcgccagataccaagttggatacatgttctgatgaggtttgcaaagagagactagttgtggcaggatattggttgagaatataaatctgcagtgatgataaatatcttcgccttgttgtaatgtaaacatagtccattgcttgaaaggccgtactacacgcgtacacagatcgggacggttcctgagttcaggactttcttggccttattcctaccactaatgattactttgcggatatacaagtcttcggcggcagactcgcactctctatcataatattaagattcaaggtacaaagcatcacctagtggttattttctgtcacatgagaaaagacctatgtcgactgcgctaaattggagaaatttcacccagagtgcattcaggtccataatacacgatagtagcatcactttgaggaattagtaattaaacgaacccaaagtgctttaaaggactagtcctccacaggcaatgcaccctcagcctgcatctcgagcgccacctcgtcaaccttcttccatacccttaatagatttcctcctgccaccttacttgcatcattgtcactcactcctcgtttgagcagctccttaatcagatgcgggaacctggacacatcctccaatccccgaggaaccgtcggaataccatcaaaatcactacctattccaacatgttcgaaacctataagattcccaatgtgcaggatatgatcagcaactcgttccagagtggcgtgagcagggtcctcgtctgggatcccatcggcgcggtcagaagccgtgcaggaaatgaagtctggtgcaaaattgaccataaccagggagttcttctcacggaccagctccaagatgtcgtcgggtacgtttcgcgggtggggacagatcgaataggctgagctatggctgtaaatcactggagcacggctccctatccactcggacttgccggcgcccagcacatcacgcatggtctccgtgctgacatgagctaaatcgacgatcattccaaggcggttcatctcaaaaaccagcttctggccttcttcgctgacgccatgccagagaggatcggacttttttattccaccgtctggaagttcgagaatggcggcgtcggcatatcgattatggcaattatgcgtcagagttgcgtacgaaacccccagctcatagaagatccggagatgcgccagtgagttgccgatcgaatgtaagccttcgataccaagcggtgagatgatctttccctcgcggaaagcggacatggcagtggtaccattggggggcttcgagaaaaccgtgggatatgcttgttgaactctcgacatgatatccacctgctccatagtctcacgcacgcctatcattctgatgtgagtatgtgtgcgaaatccatcgtaccaaattctcttacttgatgcataattctcgtcggagaaatcggtcccattcttgggacaggggacgaaaacactccaaaatgtaccaccaactctaccttgttttaatcgggggatatcaacgtgaccaggaaatttgccgttgacaaaagcctcagtgaaattgcgatcatttacgcggttatggaagagttcccgaaccaggatgggaaggtcatcatgcccgtctgttttaggctatcagtcagagttattcccacggtttttatctatccaatctccataccgatcaatggagtctgagacaggatcttctgcaccctttcctcaatgctcagggggagtaaaggagagcgcaacagtgtgaaccaggcggtggctacaatgatagagagaaacaaccaaagtatcttgaagggatggttcttctgcttcaaagttggcgcatctgcttggctctccaagacgaggctcttctcttcgctcattgtggacatctagagtgttacgaggtcgaagagcggagatgcttatcgataaggctggcttagcctcggcacgacctcggagtcttcatgctagtcgatagttcatgacaagatcagccacaaaaagttcataaagagtagataggtaatttcggtggactcaagtgatatatatttgtatgtatgtgtgcatcaaggttgtatatatgttggtgtgagtgcctaagcggcctccagggctaggcacgtgcacataacggtgctgactgaccagttaggcggtgagaactcgggtttaatctattcacaccgccttcaacccgtagatgccccggtagattatcaacttagacgagtaggctggccgggtcccttgtttaacatcctttgggatttccaggacttcattttagggaagataaacataatctcagttctccatatcgcaaaggcttgccataatgcagcctggcaagaccaccgccggtctactcccaattccggcagcagctacgcaaaagtcgggctctggagcgcccgcaaggaaaacgcctaagcctcctgctccacgtctcaaacttctcattcgacgtttgccacccgggctaacacaggccgagctggagagtgctcttggggaccagtggaaggctggagcagggaacgttgactggcttcagtacaaacctggcaaggtgtcgaaagagtaagattcaccttcctctgatgcaaaagcgtatttatttcgactggctgacgggacttcttcaaatagccccaacaaaccgtctcgcccgtcaagagcatacatacacgtcgtgtccaccgaatgtgtctctttgctctcggacgctgtgcgccaggcttctttccaggatgcccgtaacactctacacgaccccattttgctggggcctccgtcgctggagtttgcaccttatgccaagacccccggaagccgctcgcgcaaggatgctcgtcaaggcacgattgatcaagattcagacttcatcgctttcttagaaagcctgacccagcccattaccaggcctgtggctgtggattctacacccgatggcgaggacaagaagaagcaagccgtaatgaccaccccgctggtacagttcatcaaagacaagaaagccagcaagttaaaggacggcagtgggtccaaatctaaacacagtcggtcggacaaggaatcaaagcaggagaaggtacaagcaaagaaacttctacaacgaggcgataaggaaccctcggcaaactcttccgacaagaaacccaagggagaaaagacaagcaaagactctgtcaaagcaaccaaacaaggagccgctgccaatgccaagggaggcaagtcgagtacgacatcaaacgctacaaaggatacagccgcggctccagagcggaagagagagcgcggaaatgtcacagcagccaccaagattcttcagcgtgatcttggactatcgacatctggtgggcgacgacgcgggaaaggtacttcgactgatactgcgtcacctaagaacgagagctctcgagactcggctattccatcagccgatctgtccaaggaaacaaccaggcctcctaaaaccgcatcatcctcaaccaatgctccaaagcccaaggacagcgagtcatcctcgcgacccgatgcggctccaccgccacctgcaaccttaccagccaagtccactaaagctggcaaatccaagcacccatcaactgctaaacaagcattcctcaagcacgccaatccatcccagggtgtgaccgaggcacttctgcagtctgcattcaccccatttggagcagtgacgaaggtcgagattgacaagaagaagggattcggatacatagattttgctgaaccggaagcacttcgcaaggccatcgctgctagtcccgtatcggtggcccagagccaagtggtggtcttggagcggaaagagaaccccggaatcgaaaagtctcggaagggacgtgaggggttcactgccaacaagacgaaggctcccacggaagcttctgggagcacttcaggtgctggcggtcatgtaactggaggtaacgctggctcctcccgcggatctcgtggagggcgtggatcacggaataagggacccaagagtggagcttcagagaaaactggaggcaccgaggcggagtgagggcagggcctacacattgagttctttagcaattcacgagacatgataccagacggcatgacaggttttaccgacaactacataatggccgcggcaaagcatttgatttgatagactatacataaccaattcattgaaccaggcaataccaatatttcgatgtccgaaaggatgtcgcagggttatgaaaccgatgaagaggtaaggttgaagcagaagaaccgtccgagacatcacaaaactaggttcgaccagtactgtcaacagacaaagcagcgagcggtctacaacgtcttgaggaaaaaagtacgaacaggtttgaatctaaatgactgaaaaaaatgaatgtaattttttgctatgtgcatgaaccccccacagctcaacataccatctaccaagaaggaagaggacctttcagacctcctcgacacccaccaggaccgaccgaccgaaatcagacgtcgagaccaggtcaagatcatcaccactccctagaccgaaacacagacactgcgaacagcacgcgtgacagtcgaggcgggagtaaaaaggtttcactttagggcatcgaggacatgtagtcatcagcaagggtggagattctgtggctcttttaaagagtttagaaaggggacgtctactctaaagtgattctttgaactgtgaaaaggtcagcaaaatgttcgatcacagtgaaaaaatggttttctgctgtatgggggggaagaacatacgtagagtcgcttgaaaaagagaagaaggtctgggggcttgggcttctttatattcctgccgggcacgctagtgctaagcgagattgtcgtgtatttgtctggtttgtctggtttgcttggtttggctgttctccggtgggtcgtcctgtccaatcattttcttagggcggatccttcattgaaattttcaacttcagcgttcttctactcgtctgtatcattttgcattacttgattatttgtcatttctctaattctatgtgtcactcaatatttcctatctattcaaaatacgtaataacagaacctcaagaagtacgccgtacatgaccatccttctcccgaggtcgggccgcggacgcttatcgcttatcgcttatcgcttatccttgtatgcggggatctcatccaaccccagacccgtggacttgtagactcttcaagcatgccacgccccaaggtccatccagcgaatcggctgcgagcgaacactgcatgcactgcctgtcgtgcatccaaaaagcgctgcagtggttatttcccatgcaccaactgtatccataaaggatgtggccgctcatgcaccccattcaagtccttatcacacgcaggcctccgaagccctctcgtacctgcttcacgacccacagttgaggcgcctcggacacggaggggggtgtcagtggagtcgcaaagcctcctgacgtcacagtctcatgacattggtacgccccgtgtcgagcctgacacgcccgaagtgggatcgcactcgcctgaagttacgcatcggacacatccacgcatgctccgcaacctgcaaggggaacgaggtatgaacgtttgcgaccgccatgcatatcatttgattgacactgtccgcagtgtacgtcgggaaggccgcctctctatcattcctacaattgcttcgggatacagtgacccaacatattgggccctcgcagttctctcataatggggcaagtgaggatatgttagagacagaagctcatcatgatctgttgaatttctctggagaatgttgcactgttgctgagaaggagcgatttatccagaattaccacgcagcggtaggccgaataccaatcatgaagggtagatgacttactgacagtatgaaagacgagcggatttttcaatttgagctttagtgacgacgtttcatcctcattcattgacccagcagagcccaaaaccgatcgggaaaagactagggcagccatcatggaccttatggttgctatcggagcacagtcctctccgaatgaccgagaattccttcaggtggagcggttctacttttctcgcggtcaacgtaggacatttgccaacatgttggaagatcctagcgtggatttagtccgagtgtttctactcatgtccttctatatgctgggcgcatgccgtcgtaacactgcattcatgtacctgggagtggcttcaagagcagcagtggcgcttgggtttcatgcggaattttcaggttcaataagccccgatgagagtggtgagagaaatgaacggtaaaagcttctcgcaagatcttctttggcccagctaatctcaaatagatcacgattgtggatgagcttatgtattctcgatttgcttgtcagttcgatcctcgggagaccttctgctatatcacctctattacccgagaatcgacagggacctagttggggggccgcaccgagtgatcctggcctggtggcctcatatcagctgtcgttgatcctcgataaaatcataaactgcctttacagtgataaggccgcatccgcacaacaggcagacctgctattatgcaaattaaacggctggggtgaatatttgccgagttcattaaggacgtcgtctttaggacatcaagaccagagtactttccaagagcatacaattggaaacatgcacgttgcatgttcatatcattttgctgtgatcttagtcacccgacctttcctcgtctcggctttaagtgtccggctggcccggttacatcagagtctgtcgaccggtgatcccagtgaggtgcctgaggaggacccagcccactctcgtctcgcagcggcatgtattgattctgctgtatacatgctccaaacatgtctagaggttcataagtccggcctcctccttcggaatatgtgtattctcaagttagtctgcgtgtatatttatctagtaactccaatactaatctcaaacagagcgtttatctttgccgcagcccttgtactcgggttctctatgttctctcaccgtgacgtcgattctgagattgatgaggtattctgcggtgccctgaccatcttacgcatgctggcgccgcagtctgcccaggcagctcactacctagagataataacaaaactcgaggccgccataagcaaacagcgccagcaactcgctacccaagcccgacagcgacggagtcaatacgtcagtcggatatttagcatgaacgacagcccggcaacaccgcggacaccaagtgaggggaacgaagaagaagcaaatacgaccccgcatctatcgcagagtgtcacatcaaatgggtggttagattcaaacgacagcgcagctgctgtgtcacctcccatgattgaggggactttattcgactgggagggtatgaatttaccattatgggatagttttccattcctcgcggaatcgactacgatctaatgaaatatactacacttgaattataggtttagttgactaggacttgagatgtcgatcaattttcttctaaacggacgacttcacggtcggaaccaagaatccagaaggataaaggttcgaagtgtcccagtagagctggtaaatatcgtcgacatccgtagccttcagacggaacgaatcgtgcagaagtccattctcattttgccacatgagatacctgccatagaaaagaaattgatctaccttcgcatcgtccggtatatcatcgtccccagtgaagcccacaggtagcaccttattaggcgtgggacggatgtagaagaatgtgtcagattcaaaggtgtaatccttgttggtggccgtggcgatgatctgggagttattgaagacaactaatagagtatgagccgttgcctggttaaaagaaaagcgcaaatgcaaatgagataaaagagaaatatcatacatgtaacatcggttgtcaccgatccagacacccactgagacgaatcgccgacatatgcgagtcctaggtatcgggtcagatgggagtcagactcataggggaatttataataaccatccgaataaaagactttcactccgtcggatgcgacaccgtaggcaagaatggagaaggatcctgttggatagcgcttttgcagctccgattcagagggtgcagctataacttgcaaggccaaagccagactgatcggtagaatattcaatctcattttttgttttcgatgatgattctggagagaagatcatttagatatcagcgctgggtgtgcggttgggcagttataatgtcttattgtcagacaattaaccagtgaccagagacaacctggaaacagactagggtgacgcgtcagatgcacttgacggctgctacttggattaactgcgtaataatagggtttaatatatgaagggagtcgatttgatttggacctgatcagaatctaattaatatagaaaccagtggcattactacatgcaatatgaactggaagccactacaaataacccccggtctcggtgtcagccgaacaatggcaagtaagcaaggtcttctgcattgtaacccctctacctgatgacttctcattggtaactgaggaaccaatgtcaatgtggcttatttcttggcatgatcattgaagtcgaaggggaaatggttcaataaggccaattccccggttacgagtaatcaaagccaacggcgagctcgttgagctgcctcaaccgttccataccaattgctaggaggtggaggcggcagctcattgttatccctctaagcttgtaccattcactgacagctcacaccttccagccttggaaataatacgcttaaggggcagttcatgtttggcaggttcgacttgatgtatttgcactcgatatctcatcaaattgctatgttctacttgagcatctatatcattcgccatacaaccctgcaaaaaaggacaattgaagtgccaacgtaactcaagttctactagtatttgccacttgcgaggtcagcttagggtatctcaagagttaagcttactcggagcttctacattagtcgtatgttgagattattatagtcattgctttgcctatattgcttagttcaaaaagatatgtctcttaaaaccaacactctcaattgccttaaactcagacgaagctcatgtatctactattcctagattacaaaggaaaacaattaaccctactaactacataactacaacaacaatatactcacaaggaacgacatgaattgaatctgtgcagacaacgagaaccgcccattaaacgtatttacccaacacagcagcggaatgagatatcaaaaatgagatgtcaagacagaatgcaacaaggcttagacattggattcagaggagcttagtgagtgatagatatgaaatgggcccagagatgaccgtgaggaacgatgtgctagaaggacaggagaataatgagggaaaatgtaaatgaaatgaaagaacagaacagtccggttacccacgctcccaataatactcaatgacaatgacaatgactcagatgcacacgatgcagaaaaaaaagagaacagagttgaaaagaaatgacggcagagaacaagtgggaaatatgcaccgccataccgattagattggtcggaggaacattcattagatcaacacctaagacaagatcctcgaggtgggagggaatatcttgagtttaggatggacaggcgctgctagcgcctgtctagaccaccgagccttttcgagaatgtcgtttttttggattggcggaatatccaccggaagcacattgtatcggtcaaattgctctgaatagagcatacaccaatccataggatcaattgtgatccacgcggacagcacagcttctgttcatgcgatgaaaaaaaaaaaaatcatgaaacaccttattgcgccggaatcgatgcatgtctagacaagaatgcaggctcggtggatatggacctgaccaatatggccagacacaggtcactgagcgatgcaagaaactcccgcccaaaacttaaatgaaatgcgtgtagatcttggaattctcatgaacttccatctcctgtattaatgttagtaatggcacaatcgaagtatagaacaatgcaagtaactcaccatcttgaagttattaatctcctcccgaatctgttgagcaagcaacggggtgagacggttgcaagtcgcaatctctccacgtcgatcgtactcgccgctaggccaggtttcgtggaactggatgcgaggactgaagacgatatttctaccagcaacatttgacggggtgatgggcgcactcttcgcttcagaagacgagaaccgcgccgagaggaaatagtcctcgccggcaatctttaccggatcattttggtgagctggggatcgtgacgactcgtcgggtgtgggaggagcactagagtgcggtgaatcactaccggggagtgcatgtgcaggcgaggagacaccgaaatccgagtgagtttctaataaggtcagtatgctaaaatgtcaagtgtatttgtgtggagatacgcactcttcaagatacccttgcggacggccgccaggatctccgcccgttctcggtctcctcccatgatgctcttacgcgactgagagttctccgatgcggctctttcccgaatggaaacggatcgtctgacctccgatgcattgtcaaccttagggaagacagtagccccacggggcaaatctgcggggtcggggttgacagcgacacgctcccgttctgcctcaacgttcaccacggtgatctgcggggctggaatttcggggatcgcaccctccatggaattgatgctggccacggatttaggacggaacatgccaaccaatgagcgagtggagcgcttcatgcccttgcccatcttgcgaagcatcatcgacgccgaggaggcggtcgatgacactgataggttatcgttggacccggtgaagaaatggccttgatgggaatagatgctttcacctagtccgctcagttcctgctgctcggcaatagcggcttgttccgggccaagttgttctctcagagcttcacggcgcgcctggtccgcggcaaatgcttcccgcttggaagcattactttgtgcagatgtcttgaggagctcggaggcactgccaaacgagaaagcccgtctcaggcgtgatttcccggggcgcttcgtgtccattttcaaatcgttgagacgcttcgcagcaggagaatccagtgtaggcggtggtggctttttcggagcttcggctggaggtttgggtttgggggcttcgggttctgtcgataccggttgcgataatggcgatggcttgctcgtacgtttttcttctgccttgccggtcttgctagtgacggagttggattccgatggcgtcccttctcgtgcctgtgaaattgacaccgttagcgctgcattattcccatgcgaccttgtgaataatcctaccgaggaggccgacgagtgtgtcgagttaacgctacccacgctatcccgctgagagtgagaggaagcaggccgttgattggcatcaaatgtgataaagtcgtaggatcccgattggggttgagaggaaggtgaggtcgggaaatctagcggcaggtttgggtacgccgcggcatccatattgcccagacttcgtcgtcgatatcgttcgggctgggccctatcgacataagatgaatcatccacacttgagacgcgactgtgggcgcttggtcgaactggtcgagggccaccaaaatcatcgacaatcacggtcggaatcggcgagggagcaggcgatgatggtgcggcttccgctcgttgaggggtacgacgataccggttcggggagggtttcggtgacgagatgttcatgatcgggggggagggaaggttggcggtagataggggacggagcggctggtcgctcctcggccgcgagggaagtgcgctatcgtccttggaaacataggaacgggaggaagagttggagggattggatacagaaccagctgcaggatgagaggatcgggggctggcaccggtgtatgtcggattcaccggcacttgaggggtggtgggtgcagaaaaggtgcgatgttctggccggagatgtggtgtccaagattgccgattctggacggattggcccatgtttgggttgtaggcatagggagccactaccgggtggcccgctcgataagtcccggaattaccagcattgaatgatgtccaagacatagtctggatacgagagccttgattctgggtggaagaagagaaggtgcctgatgaggatgaaggacgcgtctgaagcacaggtaccgtgccactctgttgcggaattgtttgaaccaacgcagccatattgttttccccagcaaattgtcccaaggaaatcacgagttgtccagggctgtgatctaaggcaactcgcaaatagaaaaaaaaaagagatagaatatgagcccgaggtgtgttcgtgtcaaataaggatccgaggaacgagatgggatgctgcgaccaaagagctgtcagctatctatcacccaaataagaaccctcacgttgttaatgcgatatgaagggtggagtttgtaaggaaaggggtcgtgctctgcgtattttttttttctcttttgctgtgcacgttgggggggaataaggaaccgcgtcagctaggggggcaaccatacctgttctaaagtaacgtggacatagactatagtggtacaacaattaaaaaaaaggacgcttgatgccagaagaatgaaactcgaaaccaggcgagttggaagaaacgaaaggaggtgggcaaaaaaaagagggagatccctaggatgatgagacgtctctagaataggagagccatgtacaagaagaaaaaagagagtaaacagaatcaaccccaggaccttcagatgacaatgacactcgaatgtgtctgtttcttagaagtgggaagagaagaagaaggggaggagatgagaggagggaaaataggagggggagagatcacggtagacacggggtagattaggtccgggagtacggactccaaggccaacttgaatggaattggaataggaattgaatggaattgggaaatagtatagggaaatggccaggtcagttaaatcggtcaaatagctagccaaaaaagagaaattcgtttctgaactaattatgcttatgcgtcgctttgcatgataggagtacgacatgtggtatttccatttggtatgtctacatctgtctatgttgtatgtctgtctagtattgtctaatacatacatactgactatatacatactacatactagctagactaactagactaactatcctcctacttcactcattaattcacctcctgaagccgtacataaaaaggggcccgacctccaaatttatgtgccaatcatagggctccccttgatgctccatcttgatattcttagacatcttcatagccacgcattctattctgagtcaagatctttcataaatatcttgtttttgtacacgggtccaagtccgaatgtatgtcacccggtacctgaccacagagactcctgtcaaactaacgcaaggcaaccttctgcagagaacgtgggcgaaggaattagcgacatggatccgatcggcctggcaccgcgtcccgcgatttgcgcctgcactaaactgtgacgctatctcggcttttccacgaatccacatgtgttcgaaacatcctaaagtacgtggatttgtacttttggggctttgggggcttttctctgtactttgtaatgcccaaacagtaagccctaatctgtcaattgagtaaaagactccccgcttaacccggacttggagtccaagctgtttccatgggttgtagtaatccacccaagctagttgacagttatcgagcaatcatattgttctatatcgtcttattctatttcataccattcctatctactaatatctgagacacttccaatgtcacactacgtaataaggctggatttcctagttctgccgtacagcatggcgtgatcatatctatagctccgagttgaaaatttagaggaacttaatctattttcgttctctacaacctatacacttgtgtagttataccgccggtcctaaataagctttatctctcaacctcaacggtatgtaaaacgaagccctaaaatgacatgagttcgtcggcgcaacaatccagcttattgacaccgcgccactccagggctgaacctcaactgatctctacttgtaatacctgacagcgttctcctttcagagtcacgacaatatcctcgtaaattcttatctccatcgtcagataccgtacaatccgacatctccgcgtcaaaactgtcccgctttcactccccacttgctgcaaaccactcaatccgtcgatccacatacaagacaacttcccgcgtgatcggcatacacttctttcccactcgagtcgtttagaccatttatcacctccgaacagcacactccatacacaggtggagaataccagggcaccgacctttcccgagcgtggaatttagcgtgcattttagattattgcgtactgagggggggggcccgcgtctgataccgcaaatcattgattaagcatcctgacgcccccgtttcatttaccagggccctgtgcgctgccaatatccctattcaaccgaatggggaaaccctcaacaacatgcacagtacgtggctgatcaggggtagccattcgggcacagaccaagggccagcctttgtgcagtccaaatcccgaatccacacacgctgtggtctgattgtttgacgggtggatatggacgcaaccggctctagaggccttcaacactgctcattcgtgcggagtatagttcatgtagggtgctacttaatgtacaacatacggagtacgaaggacgcatatctccaccgccaagataacgtcccaaaggtcccaggtcctgtgcttgcactagcattgagtcggaagtactaacttttagtatgttgtatccggggaagcacgaggagagcggattggccattgggaatacacatggcgttgtactgtggtattatgagcctcttagcctatttcgctcggatcatgtccgatattgttgtgtcatctgctccgtgcagtgccggtttagggtacacacatgccaggccttcacctttcctaacttggatgcaggggtataaaattctattttttgatctcctggatctcatcgatcttgtctcataaacatctagccaggattatataccttgaatcaataatcttggtcatcctccgaagcattcatatcatcttcatcgtccagaccctcaaagatcatgaacttctcatttttggcatcggtttcatcaggaacaacgtttccgtcttgaacctcgcagtccttcagcacggtttcccggccgatcttactgcgacgtccaacaatggtacccgttaattgacagcgttcgccaacaacagcaccgtccatgatcaaacaacgtgtcagccgagcaccgctggcaatatggcaattagcaccgatgatggtctccttgatcacacacttctcttcaaccgttgagttgttgtccacgagacagtcgttcctcgtgacggtacaccgctgcgcgatgctcgctgtgttcgccactttggaggcgtgcgcgaatgcagacgaagcaactcggccaacctcttcgatggactctagtttagcaagatggagagaggtagatagaaggatggctgacgaatccacccgtcgaacaaaaggtgctgtgcccctttggacgtaagcgagcatcggtggtagatttgacttggaattcttggcagtttgcgacgtaaacttggctggggtggatttggtagtgctcatgctctgtagatcaatctcttcctccagtgattcaccatcgagggattcaccgtcgtgactctcactctcccctagagtgagcccgtggctctggcgacgacttttctgctggaagatttcgttgatcttcagcttctcgctgaggccttgctgccattccgatttggcccaccatccaaccaagtcttcgccgaccgactggaattgctcattcaaacgagccatgtccttgacccagtaaggtaggacgtagatatgcgcatcacggtatgtcgtcagcaatttcacctgcgcatgcgtatccaccagggaatgacgcacaaggaagcccttgtcattttccaatttctctttcaatgtggccataggcatagaaaggactagcttggagagcgaggaacggggcgcggcatgagacacggtaggagcctcattctgctcaagtggcgcaactgccaggaagtctgtagcttcgcccttgacactctcctcccgaccctgtgtctgatagtacatgctgagtccattccgacgatccttctcgccgccacacaccatccatgcttcaagcagagactcgccgggtatttcgcaaactagatcacatggcaagagaaggaagtcggacttgatacacgcctgcacctcgggcagacggaggagctctgctgtgccagtggtcatctcgagttccgccggtgcgatgacagacggcgaagggagtgaggtaagatgtgggttctgtcgtagagcggcctggaggggagcgagcgaagagggaggagtgaccaaagtgacatctagcatggtcagtcttccatccgatgttttgcgacaaagcacatggcgtcacggaatgccccgcatgctatttcgacagtgggcatgggcttaccagtaatgcccattcttttcgaccagtctagggcgtaccagagcatcggacggttggccactgggataaggcattttgggtattcctcggggttcgaggtgaatgtattaagcgatacaccagggccgcacttgtttgcttgttagcttttgtttcaagatacatatatatgggaagctagttgctcacaagaattagagcctgcaggcccgttggtggtacagatactgagtgaggcatgttttcaactaacaatgcacttgcgagtccttacacctagtcatatatttctttgaacccgataagatggaggagtcagaaaaaccacttacataatcctaacctagctggagatggcacgtgattatgacccgtcctctccagacacaaacaggacaaacacgagtaaacacccgcggtaatcaccagccacatgtttctatgacccgaggggggacgcctgcctcctttccctcgtttcgcttctcccaacctcttattttgccaatcgacgtgtcaaatgcgacctgcgagtcattgcgaccgcgactaataaccgttaaatgtgccacctctgattgaacacccgcgatcgcaatgtccttccctcaagaccctcggcgccgccgcggcggagccggaactgggttcagctcaaccggcggacggactgccattggatactggctccctttggccttgactgctggaattgcaactatcagcattgcagcttggatttggagtgaacgaaatgacgacgaagatgaagacgaagatgaagacgaagatgaccgcccccacggagatgaccgccctcacccgcctcctgttggacctggcagtgactacccaccttcctatgctaccggggattatgcccgaagcacaggagcggaagttcttcctggagatgcttcctatgatcatagtatgatgggtcgcatgcaaggtgctttgcgccgcacgcctagccctcaacagatcttcgatggcgcgagcaaaagagttgtggccggtgtcactgctgcaggagcctttgtcggtggcgctcttacctcaatccgtgaaaatgataagggtgagggcgactacgaggaccactctagatggtcggaggaggctcaaaccagggctcacgagagaagccaacaaggcgctattgcgcctactatgagtggtggattgccgagccgtccagcaaatacgcttaataaggacagaaagatcgtcgcaattgttgtttcctcggtttcaccggctgactccgacgaatttccttccgaacatgctgtaagaagtcctcacccttgatacccactttaggcctttctgacaatcgcagtccattctatcccatctccctgaacatgtcgatttggaaacctctaagatctttgtgttgatttatgccccggaattgaaacacgccatcaaaaaggggggctcatctcccacaacaccctctgtggcttcgtcttattcaaacattggcactgaagaaggagtttctgtcggggaactgggctctggggacttgagtgcggtagagccccgccaggacgacgaattggagggcacatctcgcttgttcaaaacgttatacacacaggcacaagcgattgttgagaaggacagcatgatcatgcctttcagtacccctgggggctatgtgcacctcgcccgtcacttattccccgagcttgtttatgtccaagagtctttgactggagatcatggtgaacccgccatccatatcgctaattgggttcgccaggttatcgtcgtagtcggagatgagggtggccgtggtgggctcatcgacagtgacgacgagtcagcactcggcgagaaggaagagaaatggtggaaaaaggagggcgtcacaggactcggcaagcgcattgatgtggttgacgttgtccgagtcggagatgactggagacgacgagtgaatggtctggactaggtcagatcaagttgtggcccatgatttttatgttgatacttgtctgcttgcatgtctatacatgttttcgttttctgttaaaccccctcatgactgattgaccctattcccctgtttttttttcgaattttttgccttcatttgatacaattcaactttgatattcacctttgaccagaataattaatgtgtatggttcttttgccgcaagttgctcctatttccaacatggataactctcatagttagttcacttagctatgacatctgtagaattctagttgtaaggcattagattttggtagcggtatataaaatctattcaagcattgattcatcttcatacatccatccgaggatatatttcgaagtcactttaagctatttcgctctggtctctagccaagaagacacagaagatatccaaaaaggtttacatatatcaaaagactaccaaaaagacacgccaaggtcacatagccgctgacttctcttgtatgtattcaatcagtctcattgtggtatctcattgttgcatccattcaaactagtccgaattaggaatttatcatgtgactgacttcgcgcccacggcttggcatcatcagttgacctacctctacaagacctcgtccaacggcttttccgattcacgccttcctagcagcattattggacgagtgctttctttctttcattccttaatcccactcggtcaatctccgccgatcttccgcattgattccagctgtgctggggaccggtgtcgccctacttatccccacatgtctcgcgcatcggccatctcactcatttcccgagcacggctttcattcaacatcatcaaaccatcattccgataagttgcattcttactcactggccacgccgaggttgcgcaaccggcgcagacatgatggcgaccgcaatttccaagccggcctcccatacacagaagatgaagcggccgcccccgcctttcggccaggccgcggtcaacggagtcaagggccagcacctctcatcttcgccctcatccgccgcaaaacgtcttcccacgggagtctccgtcaacgcaacttccaatttcacgaatggcgcagcccatgtggcgagttccaacaaaggcccccttaatcggaccaggaatcagtcgcaaagacccatggatcagtcctcgcgctctggccggccagtaacgaggaccgctgcagcagatcaggcacatcgagttgggaaaaaagcaccagaaccatatggtagggagttctgtgacattcgcaatgccaatgcgcgcactaactttcttttcatagtgaaaacaacatcctatatccttaagaaatattcgaaatgccccccatccctcattgtgcatctacatcctacacattttcgatttgaacagcaagatggtagcttcccttacaactccgagatgaaggtcatcatcgagcacattcgtgctgggacagttccgcatgatctgattgaggagcttctacgaggcggtgtgcagttctatgaaggtagttatcgtctttgacaggtagtcgaattacctcctgctaatatcattaggttgcctcatcgtccgtgtcgtcgatcacaaatctgcctcggcgcaagcaagaaaggcatccactacctcatccaacgagaacaacacaccattctctctacacaactacaacgaacatattaccccatcagcttatgttccatacccaaaacaaaatcagcttacgtcggccacacaaggcaccaaggccgatgggacatcgattgccaatcaacaaacagatggcccggcgactagtgagcagacggacgacaaaagcatcaacttaggtcagaaaaatgctcccatgaagcctcgagtattcaccacagtactccatcccactgctcgaactttgcaggcagagttgacgctactggtcaccactccggacccgagagccagggcaccaattcaagcaagctctagttcttcagctaccccaggaagcaatcaaccagatcgtggacacgtcgcaaagagacagaaaatgctggttgaacctgaggatcttgtggaatgcgaatctaaaatgatacaggcattggcacctcctctcttcttggatcccgtgcatagtatcgaggctgcccaagagctgttcaagcacctggaaagcccactgcatcgcgacccgccgcccttgcccaagcgccgaaagagaaccgttgccgaacttgccgcggatgaagccttggcagcggaggaggaaagattcatgctcatcatggacgagcgtctggagcccacggcttctggtcctggcggtgctgcgaaggctgctgccgtggatgacgcgggtggtgtggcaccatttgaaccccgattctctcgcttcaagacacttgaaacgattcgcatgcaacacgaggagaaggctaaacgtgaacatgaactgaagctgaagcaggagttggccaagaggcaacagcaggagcaggagagagagcggcgccgtgcgatcgagcagcggcaagccgaggaacacgcgaaagaggaatcgcggagacagcaacttgctgcccagcaggcccaggcccaactcgctgcgcaacagcaaaatcgccacattatggctcagcccaatggcatcagccaaggccaacagtcttcacccgttgtgcgtaaccagaccgcgcttgcaacttcatcaccactggttggtaatatgatgccacaggcggttccgatgaccatgaccgcatctgggtctggcggtagcccaccgcgacctccatctgctttacagcatgcgcatccgaatgtcatgagccacccgatggcaccttcgagaagccagcaaggaccaagccgacatggtactccacagatgacccaggggacaccggctatgtcgcacgccacgccaataatgcgtaacgttacgcctactcagcggatgagtcatggcagtccaactcactcgatgggccataccccggtcatgaatcagggcatgatagccacgccgcaaatgaacgggggaatgtctttcacgccacaacagcagatgatgctgcaacgacagcaagcgcttcttcaggcgcaacaacaaggacatattcagcacaatcagttcacgccacagcagctagcccaactacaagccaatgcacacgctcaacaaaatattcagtctcatcaacatcaaatgctacagcaacagcagcagcaacaacaacaacaaagcagcagcagcagcagcagcagcagcagcaacaacaacatcaacagcaacaagcacaccagggtattcctaaagtttctcagcaaggccagcaagcataccaggctcagctcatgcgtgctcaatatgcgcagatgcaaatagtcaagcagcagcagcaaggccagcacccacaaatgcagggccaacaaacccagcctcaccaaggcaatcagcaattaaaccaacaacagcagcaaatgctgatggcagctgcacaggccaatggtggcatgggtcaaaatggacagcccatgaaccaagcacagagatatacccagctctatcaacaacggctacttcgcatgcgacatgatatgtcgacacgctacatggctcagtatggcccgccaaaccagtatccttccaatattgcgcagcagtatggccctggactggaaaagaacgcgaaagcgtgggtctccgaggtcatgcgacgcgagcgggatggcggacagcaacaacagcaacagcgggctgccttgcaagcccagcaaatgcaagcgcagggctcaatgcacagcatgggtggcatgaataactgaggctagtctgtctgctggcattgatcaaatgtggcgacatacgagattgttgataaccggcgaggacagaaacttctccacatttacaattgaccagtgtaaaacctggctcgaggtcgatttataatgagcatctacctaatggcagtgggtcattggttagcaaccgctcactgtctctgcttttggctttttttttttcgcgttttctttttgttttctgtttcttttctttttcagaaatcccggggttttgtacagggaccaggcatcgtggagattggggaggatggcgttacttttattgctttttttttctcgttcgattgtactattgcggcgcggctttcggtgggaaccctgggatttctcaaactcgataccattctgtacaggcgttatttgatatcacgacgcgactatggggtttgggttggaaattgcattgtggaaatacctcgaatttgataacacaaaatgcaagaactggattctgtttattctcctagacattcgtatagcagacattttgacggtgcagcatcggtctaagcacatctcaaaccaaagctcaaatgtcataccatcacgaggcattcaatatcgctttgaatttttactcaaactaagcccatattcttgaacaggaaaaggataagacgaagcacaatcaaagtgatattcatttcatataaacaaagtctacgaatacgggatgttccagatcttcaatggatgtttgccatctcgggcgaaccgtaggacaaaaatctagtactcactggctagggaaatagttaaatctccatttcgatataagcacttcttcggcgcgaccgcggccatgaaagggccggatcgcaatttgacatccgtgctataagctgaaaagctgtgtgtgaaagggaaaggcacataataatgatggtaagtattcaattagacacataaggtatcagagctatgaaaaaagggagatggggaatatcaaaagatatcgtcagtatgtaccacccagtaaaagaccgttggtcggtggccatcacttcctgagactgttctctggtcaatcgttactcagactgttgagcttgatatttttgaaacattcatggagaagttcatgtcaatagaaattggtgatcatcatagtaaggagagaccagagtgtctcgcgagatgtggagggtatatagaggcaaggctaaagccaatgaccaagggaagacattaatcccttgagcaatggctttgcaaagcgcattgttgtatggtcgagtggtagacaaaagatgtcggatttaatgtgaaggatctacggaaaatctgagcgctgagtttttatatcgtgtgattacataaatgatgtgtcagcacggccgagtccgtggatgactaaactggttcccgatcggggaaggtatcaacagccgagtagttatacatttcaaagatggactcatatgggactttggtgtcttatgacttggagagtactatcacccgatgaagaagacgagtggacataatagcatggtgcctgggctaagactggattggaagtgcattcaagaattaacaatacaatcaattccatcgaatgggaaggcgggaaataagacacccacgaaaatatatggattcttgtgaggatggccacttcgagacctcaagcgagggatgatcgccgcacatcacccgaggaccaagtaagccgagcgaataagaatagccggaccccttcactaacactgataaacacagactggagtgtataatgatgttgatgttgcattgcatagaaatgaatcagaaataactcatactaaaacaacccaatctcagagcctagaagcgactttattgacactctaatatcacataccaatgcatgtacaaagtacatcgtacgatccgtgcagttacatagtcagtgtagatctgtatagcgtgtatgcacggccaatcgaaaagggttctcacatataaacgccaagccagattgccattgcatggacataggtacggtttggttcggatgctagagggcccgtagttatgctattctaaaccctgtataatgtctcactatacgacattctaccctaataatcgagtccatgcgcatagacatgccgatgcggtccacgagtgtgttaataggcattgtctatgtggggagagtttccccctggaatgtgataaaagtgtacacattaacgaaacgttcgttttatctgatattttctaaggaaatctaacagaagaggaaaaagccaaaagcattcgtaatcgctgcagtgagatctctaaatagcaatggaacacgaagcgaaaacagtttaccgatcattcgcgcacgcaatctagaaaagaacaaatatttacggggaaacaatacttcgttatacaggatcaatagcctattagcgggtagacggatgcatttccagacggtatttcttataggacgaaacccaggaatggaaattaatagagtgcgaaggcgatagaaggtgattggatatcattcccgcataccatgccattggacggactccccattcccgatttgtacggcgtggcatatacatagcgcagtgtaactgttcatgcaggacatgggcgtcgggctaatttaacgtcgtgcctaataatcaccacaccgcacaatgtgccaaccatcggtgtagcgggtggactgagttatttggaatgggatttggaattcaagagtaggtggggagttgaggaatacggtttggaattagtggaatatctctgatatcggaaaataaatgaggctagtactctgtatattgtatgttgtacctttgaagatgatagatgggggtatatgccggtaatggatgtgcagggcaaaaaggccgacgaacaccctcctttggacttcgaagaacggtcagagattccatgcacgttgatcattagtggaaaaaaaaaatacgggtttgatccggaggtcaatgggtcctttctcatagggcattgatctcttcttttgctttgctcggaaagcgctcatgcccgtggacctgggaatgaggaatggggtgacgcatgaacacccacggtggcgaaaatccaggcacgtaggagcgcggctctacggtgtgggatccttggccatgaagcatgtccaatgtagcacgaaattatctttttgctttttctcattcccgtctcgtttctatacttgctttttcgcggtgctatacttagaactatggagtacgttggagggtttttgcaaggttcaagtcttcacagagaacgggtgaatggggctccacatggctgtctgatacatgctactagcgatattggtcgcgctgtcgaaagtggcgcaggtcatatagtggagtatcggctgctcgtccattgtggtttgcagtacggagtagtgtttcagtgcatattcggggcactgtgttccacattaaaagtataggagtattctaattgtagacgaacaatgtccatagccgcggtgtagagatgatgacatggcgtttctgaaacggggtgatgagaacactcccatttaggagtggaatgtgtggagagctccgaggacagacgagtgaaaagtacagtttgaccatgatcatgtctgcagcaggctcgatttgtgccacattgatccacttcatcgaccagatagatcggtttggagagatccaggaactaaagatctagagccccgagggttgtgatgtgtaacatttttggggcatgtcatagctcccccaccgtgcgagtggcgaagtgagcaggttccaagctgtagcagtctagcccatagcccagaatcctagtaagttgttaaaagggaagtggtatacaagaagtggaggcaacgagaatgcagtgcaacaatgtagatctgggttttttgtgtatattatgccagtgtgcgattatgggggtggtagtacaagcaataaatggagaaaaagaatagaacaacaacacgttgtagcagattgtacacgatcgcccgacccctgagggtgttcctcccaaatgattatcccagttggcgatctcccccaaaccagaacgggaaaaaaaagagaaagacatatgcaacgccgcatcaattccatgttcagaaaataaccccagcctttggcaccaggcaaattatgcaagagaaagagaaaaataaaagggaataaatcaaaaaagtcgcctctcctccaggagacatgtacaacgccgggcgagaggtcaatctggcctaaaatgccagtccgccagagacggggtatcaatagaggccaagggccaagtttgggttttgtgtttttataattccatattttcctctggaagactcatgtggaattggattttgtgttttttttgggagtttttcgattttcgattttgttttggtgcggtcattcggctaatcatcccagccatcgacgctcagctcgccacagtcaggcatagtatcttcaagcttgctgccgtagatgggccgaccgtcgggagtaagttgtccacggaaatcagggtcgaaatcctgactggtctcatcgagagtcgcaacgtagcggttgcgaccgccccgcttgctgtgggtcttggtgtagtgagcgttgaggttgtcgctgcgggagaatgcacggtgacatccaggaacccagcagacatgaggcttttccttggagtggctcttcatgtgacgcttaaggtgctcctgacgcttgaaacgccccttgcagccaggctccttgcacttgaactgcacttgcttgatgattgacggcaagttctcgagactcaggttagagcggaggagctgtttcttagaggacttgcgcgagggctggcggtgtcgttgcatcatgccttcacgataaactggggagagttgaaagtcttcctgataatcattgtgtccggacattcggctgaccggagtgtctgatcccgagggagtccccatagagacggatcggtggggggtagaaggagtgtgggacttgaaagttgggatattggtggggaagtcggagtaggaagaagatggaggggtcacgggtcctgaaggaaagggttggacctgagccggggtgatggtttgaggtaccaaggactcgtgggagggcatccagtggagcatattagacattgaggcggaattaggcatccgctcagtgggttgggtaaagattggacgagacaagcaagggttggaggccgattcaggcagatatccagcctgttgagggcggtggtagtagttgcgagccatctggttgtactgaggcatcgaggcctggtagggaaactggtgctcatggtatgtctttggcatatcctgagggatccaaagttggtcgacgttctcatcatacccaggaagatagtctgggaggggcatctgctcctgtcggtccatcgtgccgcagggcatacccatcatggtttcgctcgaggtgagatccgccatgcggaatgcgctacgtagcggggtagctgaagttcgacgctccattgggacgccgtggtgatagtgaggatggtcgtgccatccgggtgaggccattgagccttggctgtaaagactggtaggcgtgggagtcggagagtccaaaggagaaaagcccgaagtcatcgaggggcattcacttgagctcaaagagtggcagtcaacttcaacggtcaaacgatcagagatgtgctgtccgtgagatctcatatcgtccaagtcctcagtcttgaaaggccgagatgcaaccgagttgatagtgtcacctgtccgggggactttagcaattgttttgtgtttttttttggtgtttgtgtttgtgtgtaataaggaaaggcaaggtcaagcaattgacaagtagagagaacagagcgagggtcgagaggtaaagaaagatcaaatgaaagtaactataaaagaaaggcagggatggaaagagatagaggcaaagcgaagacaagagaatgtgtattaggtcccggagtatagggaaaggaaagaatgttcaaaagcaaagggaatggaggacaaacgagcagaaataaacaaattggtcctgcgtagaatcccgaggggtggagatccgacttacagctatacgccatggtctaagctctgattcggacttgggaccaaaattagagacgcgtcgcgtgctagaggttccaagcaaggctaggaatgtagactataagatcctccgttaccgcggcaaaggctctaacggctggatctgggctgggatcgactgaagtgcctcgaggcctgcaggtttgatcgatgtttcgcgctgtttcgcgtccaaacgggacaataaggtgggctggtatggaacaccaagacgataggcgatgtattggtgtcagaagccctttgacgcggtttaagatggacggttgaaggggaggctgggtctcagattggatcaatagaggtaggggggtggtgtataagtgtatctggcttgaggggaggggagattataagtacagcaaggagtagtgaagggaacgatgtcttaaagagcccggaaatcagtaaggcaatgagaaagcaatgatccacggggaagcttgttcctggtacctttttgggccgacggtgctgcttgagagatttggatcggcgtccctcgccttttgttttttttttttttttttaaatcggtttaatatttagtattattgtgtatattgtttattcctttggctattaatacaagattaactaaaaggatcaatagccagaataatcgggaatcccttttcggcctacccactttatagtacctcacctataatccctattaattctggttcatgcatcattattcctctccaccaatcctggatcatgctcgctgtactccattggaatgtctaggctgtacctcttaggttccgtgaaatgtgagcagagtctatttgtacatgcaggtcgatctcgtccccggactttctagccgtgtcgatcatgatgcacaacccatctacgactctatgatctcctattactctccactctaggtctcagaagcaacccttgacggcgaaaagagtatttatgctcctgtatttactgtcaaaacaaaaatacccaatatttaacaacccgaggacacccagagacacacggaaataactataacccaaaaatatgagctcgctcggacgatagtggaggctggatcgatctcattcgtacttttgcgacaggtcagacgtttgaactcattcgggtctgtgcaaacctggttgacgctgcatctctcccggagagtagcaatctcggattccagagcttccaccgacaacattcccctattcctccgccttatttcctctcgccaagagtgtcatcgtcactggtggatcggccattgtatttttataaaattcaatttgtttgatactcttttatcttatcttttcctacctgagtctagtccccgcccctccacccccccgacccatccgccccacgatgtaagccgtacatannnnnnnnnnnnnnnnnnnnnnnnnnnnnnnnnnnnnnnnnnnnnnnnnnnnnnnnnnnnnnnnnnnnnnnnnnnnnnnnnnnnnnnnnnnnnnnnnnnnnnnnnnnnnnnnnnnnnnnnnnnnnnnnnnnnnnnnnnnnnnnnctccacccccccgacccatccgccctacgatgtaagccgtacatacctccagggggtccccgtacggacaacaaatcaattcagtcattcggtctccattggaatgtgagaagataaaaaagcaaaagcaccgcaagcctcggggaacaactgtcatccatcccgctgggtctgcgaagagaaaaaaaagccaatccgccctaacggttcggacggtgtcgggctaagctggcacttgcgtctgacccatcacgcgtcagttgagacccgaatgatgggattgtcctcgatgttgcattcattttgctctcgacctgcgtggctaatagtcggaggccaaactttcgcattcttctttggatgctcgttccacgaccgtggccactcatttgaaacatgtccccgtccagatagtgatcggcctcgaatgtttgtcaccgctgcaggtgtgcgaaatgggggaccggttctccatagtaatgggaattctgttatctcactgtttgccttggtatcacatcgcgtggatggagatgaaacagggcttatccgtttgaccataaggctaacgaatttcgccttgagaaaaaaaagccgtactaacctcattttagcagtcagattaggtttcaactggactacaattgctggtccgtacttcttttcctcggcccctcttttttttgtcgatcgtttatcgctctcgcgtcgatctgtgtccgccagtgcgatattgctctgtatcgactgtcagatctagcccccgacaagcccccacttcacttccttctatttcttgcatctcaactacttccttaaaatccttcgccacgctttattgatatacctgcataactatcccccatgagcttgaaaaccggtttgacacgcttcttcggggtctattgacaagatgcatttattcctgcagttagtcaagactattgtactttgtgtgagtcccgaaaacctggaacctggaagtgaacgagccccgccaagacctaagctaacggaggttgtcccatggactttctgacttctaagtttttggttaaggttccctgactcgggttctatacatcgacggagtacataaatgtaaccttttaaagttatacatagactttcagtcttgatatctacaaatggagagaatctatctgagcattttgtagcctgagcattttcgctgatcaatttcctaatgcttagacctcagtgcagcaagggtgaccgaatcccgaaccccaaaacagaaaggtgttcccccagatctgtcggcccctgcgtctgaagggacggacttcaccttcgtatagggtttcccttcaccacaaacccaccaaatccgtcttcatgcttcacttttcgacactagagaccacaatcaccaactagatatcgtattgcagtcgggcccgttcctggaacctctagaccactgctaaagtacctactcaacccgcctaatccaccgcaatgtcgtgatcatcgacgctggaaggtttcgatagtgactttgctttcgtcgcatcgagtcatacctcaatctgcacagccacctcagcctacctggtcgcgccacccgtagagtgtgatcgctggtggcttgtgaatggagtgtggcttatctggggtgatcgtcgagatatcgtacatcttaagatctacagtgagtctctcgccaccgctgttgactgcgagatttttgcctgtggttttttggggctctgggatgacttgttgaggctctctatgtatgatcccctgttgatcgcattgcttggtttcggatatgtgcagcggtggcgagtgaaacatcgaggcagactatctctgtccaaagtacatgtagttgccctttttcggtaatcacatactacacgattacgtaccattgctgcgtgagatcccaggctagatacaactatgttgtacctcaactaatattgtactatctattattgtgtccactcgatgattgacattcttcggtatgcacaacactgtgtctgagggcaagtgctgacgggtgccactgacgcaactgcgaatgtccctgaattgtacttcggatttgtgatctcataccaatacttcaataggttcgatatgcaatctgcaataaaggttatcagcctcaaagcgcctgactactacgatcggggaccgtgcaactgaattcaaatgtcccaaatcgggttttgttgcctctatcgctttttgcctcttatcgaataatttggccgagtgaaacaagcattgtagaattcacaaagtaccgacaatgatttgtctcatagaataatttggcatttgggtcggatgatgcagggacgaagttgagcggcctataggaagtaagcatcagcgataggctgcaaaagcgatcaatagtacacaacataagaagacaggcacagatgcgatcatgcacaacccccgaaatggcacctagtgctctctcggtagtctctcggtgttgccctggcctagcaatttcccccccgtcaccccgcccccttacttttttatttccttttttctcttcacataacggtttcccgttcgctcacaatggcattaaaagaagatttgatttgctttttcaattcgcttttcctccaatgaatactccacgttgacttgcattgcattgccttgcatggaattgttcccggtttccaggaaccagcttaattgtggcaaaagtctatgcgcttaccctaggactctaggtctgccctattgaggtattcttgcctatggtggatcctcctctaaccatcttagtcgcactttagggattccccaggttgaatcctcgtgtgcccgtggacatcgtacctgtctgccctgtctactccttagaacgcgatgtgagtcgcgatgaaggagcacacataccactacgatacttaataccatgattcgcgactccatgtgaaaaaaatacattaagtttctattgcttgaatggttgaatcaaaaaacaataagaaaaccttacagtgtcgtagagatgcagcgttgcaataattccgcccgtatcacataccagcgcaagcacactgacctgctctattattcactctactggcccatgcatgcccgctgccacaatcttatgtaactcagtccatactccagggctaggaccaaagtagctatgtacccacggtaggataagcatgcgcccgaaaaaagaaaagctaggctcgagtccccaataagagccggatcgaccctgcacatcggactctctggagaatgtcagacatgggtgctttgcaggacccctgcagcgcacgaaccatgtctagcctgtgcggtcggcgacagcgcgctctgattggtgtgattgcggatgatcgctggtgggaattcggtgatatcatattattggggcccttgcgccttgtcggtgcttggctggcctacttgggagacgtacatgctgttataagatgtggtttcatttttgctacatattggctctagggccgcgactccagtgcacgactatggagttgtctcgagtactattcttactgtatcttggtttcggggtgtcgtgttaaatttggcttgctaggaccgcgacgtgtgcttgggatgaactcctgtgacgcggattaaccagacagggtctctgtatatcattcttgacttgttgggtttatacgcgctctgtgccgccttggattgggcacggccggtctgtgctctgactaaagagtgatcgtcgtaagctcttcgtataggttttctgagcggaaatgtgaagttagatgactagtgctgaactttatagtcttatgggaccatcacagcaaaagtatagcaaactgatcttcacatgggctattccgttctggggtttgacgtttctgatatcatttctggcgtacttgtagatatcctcttccaatccttgtccatctactcaagcgtaagaatagcggacaacagctaaaatcgtaaataacagaatacccaaagcagcctacatgatgattcgagaagactgccgcaaatgaacttgatgtgggatctactagtagttctgggatgagtgtagtgaaagaaactttatgatcttatggtggtatggtgtgatatttatcgagtggggttctactagcgatgctagcttgactgaggatgattgcacttgaatagcaagatgtattctatatcggtagggatatgctaatgtgcgatggctaatctacatcatactctctcaaattgtatgttctacgttcttgaatgtgaatatatatatcatgattagaaggcacagaagacatagatttgagtatagcgccttctggattatttcaagtacagaagtatgtttttctcaccatcatcaaatcgtatctttatttcatatattaagctacgtgagcggtgcatttacttttaattcgcctaatcttctcttccagttgggaccaagtcgtatagcagtaatcagcagtgtggtggatatttgactcttgtctggtttcgaattcgagagatcgcgtccgcgctcacagctacatttcgaagtgttggactcaacacggtatcatattctggcagctacgtaattttgataaaagacagtagaatttattatcaaactaacatatgaacggagtgaaggtcagtgagcgatgagaccgggctggacatgtgacactgatcacatgactatatcaactggcccctccctgtcccacttttctcttctcttccctccaaccacaatcaccactcgtatacaatatacatcctggctagtccatcacgatatttttaattaatttggggatgaggaacgctggactctcgttcgaatagaggacagaggatttaccctcactggtaaagcttttccgtcatgctttcatacccctggttcagcgacatctcaaactcagacctaggacttggaccagatgcagtctcgaactggaagcgcaaacaactacacaccgaattgaattgtctcctagagcatggaccgaaatgggcataaatgcatcctctccatataaggtcaccgggttacgactggcccgtataattcaaaaagcgaggaagaaggaatgagcgcgtgacaggaagcggttcgtaacatttttggcaagaaagggacagagaccaatgggaacaggcaattgtggctggcgaagttgccaggccagcggcatggacaccgagcgagtgaaaaagcctatgaccaatccggatcaggaggagacaggggaaaaagctatgtctactgggtagatgctttatggcctcatcatcttgtcgcgactaaaccaacgaatgcccccatggaccttgccctttattgcctactctgagggattccgagaaaaatcctccgataatgacctgatgcctgaatcagccagagaatacgaaacaagctggatgattgggctactccgagaagcagatgctcgacgttggaccgaggaacggcatatacctccaccacgagaaatccatcatacgctccgggcagattttcactatcacaaccgacaagtctgcgttcatatctgaacctaagactggtaattttatcaggtgccactgtgggcatccagccgtgatatttgtgatcatccctggttatctgtttagtagtcatgagaaatcaagtctaatgaacacgtcaacgggtcaaagagtaatttatatggcttgtatattgaatagagtaattatcaagcctagaaaaaaaacaagtaagctatgtcgagtgacagattttcttgcatgtttcttgaaacatcctcgtattccatattggccgtgtgacttttatgtgctgatcggccgatgagagctctcggttggactctagacgaagacagatatgatttgccttagaaaagacaaagaatcagggtgacctccagagaaaagacgcaatgatctgcacaagatgtgacagtgccgaccctggatttttgggaaagggacgcgtgaaggcgaagaacgtagtaacaacgtatagaacttgggcaggtcttgttctacagtcgacatattttcggccttcaggttaaaagaagaggactcccataatcgtacatatgacttgatcccttttgattctttgctaggtgactcttatgcaagacagatctattaccatattgcgacttacagcgagaatcagttcaaaagccaaagcctcggctagctagaccacgcgaggacatggaatgaccaaataccgatctgtctatatgctgcaagcaagtagctgcccgcttagtccaagcccgaaccatttgaataggtgcattgcccaaattcgagccgtgataccaaaagattactaggacgaacaggtattacaaatatctgaacaggtagcgaagcagaacccaagaaccaatgatctcgacaagttcccaggacagacaagaatctcatctccgacaaatgcaagcccaaaaccgaacgtgtcgcatcttgcgacgtgggtgccacccgactcccgcttgtgtcgtgcaacggaaagctgcagacgaaaaagaaagaagggaaaaaacaaagagagaaaaacttcgctcaattccccgagaaaatcccccggttccggggcattcaacatctccacaaatcatgcggtgttggtctgattcgaaatctcaaggcgcagcttcgggcgcatgcagaagacaaaggcgagaccagtggacgggaacttgcagttttgcgtggtcaagtcaagaaaatgcggtcagcattttcgtcctgagatatcactgcatataatcgaagcctcgtgtacggtcagatatcttcctttataatggacccggggtgttgatttgccgcagacattgaagatcgatatgttccaaggttgaaggaccgaccggctcatgctttggggctagaccgatgtgaaaaaccaacatgaaggtggggttgggtgttgggaagatgcctgtcggactgcgtcgacatcgagagcgaaagaccgatcgcactacccaagaccacgttgctcttcccggaagcagggccctgaacccgtagagcgaatattatcgcttatattcaggggctgtgacacgttgtgtcctttgatgctaactcatcatcggccttcggatttaaacgtgcgatgtgacaacgtacttttgagacatgtcagatcgagccccgaactccgagctccgagtttcaagataacaagtccctggaagaatgggatatgacttgaatggagaacaataccaagctgatgtcgagataaatgtgaaaggaaacaaatatcgaagacaaaggaaaaaagagggggttagagtaccctggtctcaactgccgtctgtcattggactcggacaacgcacaaacaaaggcagcaaattagagcggatggcgtcacaaagataaaaacaaccttccttctcgacattccaagatatctagggcgccctttcttgaccttttttccaagacaatcccacaatcgatacaatgacaggcgagacagagccactattgggcgcacacgcgatcaaaccagcccagcatccaaagaaactactggtgtccatcgtgtgcgctgtattcttgatatgcgccgatttcggattcttcatgtccaccgcgccgcagattgcagtgtatgaagatatcatctgtcgaaactaccaggacactcttcatagggcgggaaatgagactctgagttcgccagtgtccaatccgtgtaaatcagaggcggtacagggagaattggcgctcgtgatcgggtaccaaagtacatttgatgtgatgcctggtaggtatcttccacgatatactggacttggggatcctgatgcctgaaatacaggtcttatactctcgctgccatatggcgtgctgtcggatcgttgggggcggaagcctctcttgtatcttggcatactaggcattcttctcggagagatctgggttaggatagtttgtaagttgtttgaacttgttactcgataatttcctgatcacttcatcttaggtctgtggtcaagtgtcattcccctccggatggtctggttatcagccgtgtttaaaatcatcggcggcggcgaccaagtcctcacggctattgccatggtcatagtggctgatgtcttctccgacgatgagaggtactgttatggcccgattcattgtgataaagctaacaaatatacagagctactgcgctcttccgtttacaatcttgtatccaaatcgcagagattctggccactccccttagtgcttatctgatgaccttcggtccaatgttcccctttatcctatccctatgcatcatcaccgtgggaagtatcccacccttcttcctgcccgagactctcagaaacgcaaaaggaaagcaaatcagcagagaaggtctagaacaggacagcgaaagcgagcagccccagcccccgaggaagacggcgttgcaggagctcacccgacaagtgcgcgagttcgcacagtcgacacgcttcatttgggccgattccaatgtctgtctaatgatctttgtgatgttcgtcacagtgatgagtcgacagtgcaccaatctgcttctgcaatatgtgtcaaagaagtttgactggagtattagtcgtgtacgtgcctgtccctccggtcgaaccaaaaactaaccatgctataggccagtctcttgatctcattgcgcgggatattttccctcgtgacctatttggtcataatgccaatcctcgccattttagccgccaaacacctgaatctccgtggaaatcgtagcgaccatttcctgagcaaaggcagcggcgtgctttcaatcattggatttgctattatctccatagctcctacacccgctatcttggtaggtggtcaggtcgtcttgtcaatcggatcatcatttatggtcaccacacgcagtctggctacttcactcgtacaaccagaccatgtcggcaccttgtattcggcaattgccattgcacagggcgcaggaaccctcctttccggtccactatttgccaacctcttccggttaggcatgcatcttggacctgattggatgggactgccgttcttccaagcctctctctttttcgttgtggctgtcaccgccgtttggcacattcgacttggaccatctccgcgaaccaatgacgaggaacaggaacctttgttgtcgtacttctaatatttcttcagtcaatttcattatatccaagcaattcaacacggatcccttcatgtggagagttatcgctgaaccaggcgaattgggtgattgagcctccatcaatgagcatcggaatcacacagatgatcgacaaggccgacagttgtaaacctaagtacaccatccaagctatcgaagcagccctcggcgacgtcgatgacccgttaatcgcgatatcccgcactacatctaaagaatacagcagaatttcatttattaatagaccactttgaacgaaactgtagaagaataaatacgcatagtctgctcagtttccatcatccgatctatttcatacttttgaataaacatgatcattcgaccctagggtaacaataatcttcatggggtactccgtagtgacaacagagtttggttggcaaaatataccatcaaggtataatctcaagaggtaggaggacacgcagcatgccagtcgggacatggaaactggcgcatacagcttgacgacgtcatttgcggtcgattcggggcctaagtcctactcggtatgtccgcggcactggtttgctgccgtaggtcccgacccatcatgggtctggtttgctttcgcgggtgttccagcaagacccgtatcctgacatttcgttctcttgtcatgatgtcctgactcatcattggtctggtcttcgcttctgacttgttctggcctgcggtcgatatacatcacgtagagagacttgggcggaggaaagccgaacatcgttgaagtacagctgtcctaaccggacgaaaaaagggcatgaggccaatcaaaacatatatgctcttcgtataccatggacctaataacgcgctgcctggtatcgatatgatatgtaatatgtaatagaaattttcatatgttaagcccgttctagacaatttagtgcattctcttgacgttgtatgcgaccagagattatgagcctgatggccttgagtagaatcaatgacggtttatacggcgggtcattgataagcagacatttccgaggcggcttttgttttagtacatcgatagatggccatagagacagccttctgttaaatcctcttctactggataagctattgctagaatcgtaatcaaggatagccaagagagagacgccatattagggttacgacagaatatccattatgcttagagtgattaatttctgaaactgcatgaatttatgacaattctgaacagaaaaaatttgaaagtctaaggttctaaggttctggaattatgggtgtgtattacaaaaatatccccttccttttattggaaatgttgtttcaaaatagcaagcgctttgatttgatactgtcagcaactgttgaacacttgctcttaaaatgctaagagcgctcagaaattttactatatatcgacatggcagacctagattatctttatcaataatatgtcgaggtaagaagggaaaggggtttggtacaaaggcagctgctttcagtttctgattgttcaaataggtgcatccattacacaggaggagcttttcgcttatactaatggccattttcttactaacgaataataccagctaaacagaagatatgtccggtttgatgtggataagctttgtaatactactgtaacagtcggcggaaagtctagttaggtcacagctattgacaaaatggaaggaggtttcagtaaggcttttttgataagaaaggaaaatggatccgaagtgatagcaaaaattctatgccacattgctggcccgcctaccttaacgacagctggtgaagtcggcgctctcgaatacagtacgttatattggtataattctacttccagtggctaatatcctataaaatagtcagaaaacacactagcatccctgtccctcgtattcttgcctagtcttcgaataactcgaatgctgtcggtacagaatatatcatcatggagaaagccgccggtgttctactgtttcaggttttcgtgtgtgcttgatacaactctttcagaattggtcggaccttggattttctggagaatgccctttatcctttacgtaggagcaggtcgatacgcacgatcgctaattctctgagtatcaagcttggtataagattcaggctcttgcgtaagaatgccttgacactgatgcggaaggatgggttgtaccaggattggatatgaatgagaagaggacgcagaataaggaattgttgactatgtacattgaaagcgttgctagggagaaatctgtagaagaggcgagagccatatagcctttcccggtcaaggcaggagtatgatttgagaattttattatactagattgacagataaatagaaagaattctggaggctgtcatgatattttttacctccataggaaaaccggaggaccagctgacttaggccatggtaaataacgactgccgtccctctcaaccaccaactaccttaactttataccgcacaaaacctggagctaatgtatgaaaccgggtctatgtatatctcctgaatgaaaataagggaaacgggtttagattatacttagatcttcgtagacagggcagtcctccgtatggaaagtactcttggtcactttcaatacatttttatctaagtgaaggcggtttatagatgattgcctggggatttaagactcttctgggtcctcgcgggctgcaatctagttagcgcaaggatagacggtaagtcaacggttacaccctcgtctgctggcacaagaaagcttccatcgattaaattctcccagaactctgatgtagccattatctcagtatcggtaacagaaccaggctgctccacctcatcatagccacaatcctcgtcaacgtgaatcacgatatggttagatgccgagtccaaaggagcaggatcatctctaatcactatgggattggtctctgtgtctgactcaggagaatcgatgaattcgcatatgaccacagcaggtcactctgaaggttcagctgggattgatgttaagatcgcttcttcccaggttctgcaaattacctggtcgttccctttgcattgtgtcgtctgaatttaagaggtggatcttgattcaaagagtgggagcactccaagaggagatggtatcaaggtctttgtaatttggagagctgtggtcggccatcgatttgttggaaagggggagtcatacctctacacaagtgctagctcattcccgaatcagttttctatacagtaacgccgcagaatccctgccactggtttcgaagtactaatttattttagccaggggcgcttgttatgagtcatgcgacgttaaaaacatgattccgatgcattatgccatagtccagggatctgaagagaccatcgaagctttgattcaagcaggagcatgtgtagacgctggcaccgtgaggaagagatggacacgaattgaaaaatctggcagatggaattaccatctttcacctggagaccaaaaagcctcgggaacccggacttctcatggcttaactccacttcattgggcagcactcattggccacccggcaatgatcaaatatcttctttccaaaggagcagatcccaacaagtgttatcaggacggcgacactccgttgcaccttgccatccgagcagatatcattcgtgataacaatgatgcttggaattcatcttcgtggcgaattgaaatctacaatgatttagttgaggctggaagtgaagaggctgacgatgcgcgtcaccacgtatccgaaattcgctcggctgtaatcgaagttcttctctcgcatcctagcatagacgtcgatcttcagaacgagcaactgcaaactccattgcacctggttgcatgttgcaaagatttctcgatggtttctttttcaagattgatgatcaagaaacccgataactcaatttgcaactacaaaggacaaactccattacatcttgccagtggcgcagggaaagctagaatggttaaacatcttctcgctgcaagagcctcagttgatgttctagattccgaaggatcaagtccccttcaatacagtgttcgctctggaaagtctgctgcggctgttgtcaaactcttactaaaatgctatgacatgactcagttgaattcatgtactcaaaaagatggggcaggcaaaaatttgttacatcactatcttcaaacagacgctccctcccaaaagctaattctcacgttgttgaatcatggcgcgaatgtgaatgaaatcgacacagaaggcaattccccactcagcctttgtctgcgcacgtctaatttgatatttaaacgagcctcgatctgtcgcttcctattgaaaaatggcgcttccattttgtggactgatgaatcagggagaaatttggctcatgtatcgatgcttgcttatccttggatgccggttgatggagttctctcgaccctgtcagagttcgggatcgatatggcagcgaaagatccaaataatcggggcatacttcatcacggagccatgtatgggtcggtaacccaaggagttgttgaccttctacgagggagcgggtcacttagcctacatgatcgggacaatgatggtagaacccctctttcatacgcagaggctaagctgcatccgaatcggggattctcacggaacagacgggaattgactctcgatgttctattgaaggcggccaatggagactgaggaggatcctggccgatttcaatccacttgctacttttcaacgcccgtgcagttttatggctttctatagattggttgccatgtcgcccatgggactgcaacgagcttagtctatgtcgccgttgccgaaaaagtatttgatgttctcacggaaactgcgtatgaaatatccggcctcataactctcctttaaccgattacgccttgttcagcctgcagggtgaggcgggtttcacattcaaacgaggctgtctgccaatagttttcatatcagatacacagagcaaggtaccgcacaaatgactagcctgcccatcaacttgattcataaccacaccacaacgatgctgctattcctacggagctgtatgttgttatctacggccagtatcatcaccactggatcaattgagctctgctagccagtctttccatgtctcgagataaaagacaaaacgcgcaagactggccagcacggaggcacacaccctgcacatgtccagtccacacaacttgttcctagcccttgtctgtctcatccttttatgaatattgatcatggaaacaacggggactacggtcacaagcgccttgatgataaggccgggacgcgtaggtatccgggatcggttgcgcgatagactagtgtaaaatcgagggagctggatatttccgcgcgaatcaaggcgccacctcacagctttacagatccgaaggccgtttggaggtatcgacatgaccgccgtgaactattgcggtcatcgtcaaaataaaactgcctgtgttagtcgcatcaattgcgcttactgagcaagtaccggctcacgcgaatcgcagctaagccagtctgatcaatcaattgagccgagtaatccgagcccggtcatcttcggttccatattgaggctagcgcccttcagccaaggctgacgacaaggctctcgcgcggtgtcggccctagggcagattttcaggcccgctgcacagggacaaatattctgaaaacatgtagggcggatgcgcctgcatgcgcggaggccaaatataggtcggcggattgacacctgacgccatggtcgggcctgagaaggaaaacagggccggaggagggcagttcgaatcgttcgaattgcagacgcggggtcgcagaagagccgacgagtcacacacaggggaaagggggtggcggagctcaggagctcggtgatccggatcaatagcaaaaatgcctcatctgtgaggcgtaggggagaaagaaggcgaaaaacaaaatcggggctgttggatggagggggagagcaggggacctatatagtaccacgcacggggaggcataaggacaaagagcgctaaacctaaggggtcaagactaaacctaacggagcaattcgcagtccccatccgatatggtgtagtggctaacatcgccgtctctcacacggcagccgggggttcgattccccctatcggagtttgttttttatttttatttttttctttccttattgtatatagtatcagcatcatgctagtcacttattttgtatctggctttctcaaggaacaagaatgtcattggtggctgttccagcgcgggtggaatccatgagtcacacagcctcctaatggataccaagccacgatcgtattctgagtcattagcatcctcgagggctgatttggcctatcaccaggagttagacattatcacttcctgcgtactttacctacaggtatgactgaacgtggatcatcccagaattacatctccagccgtacagggctgagtcgcgactcgccaaggtgacatctagattaaaataaatgtgtttggcctatgcccttggggtgatatatataattcacctcggtttccaagttaaataattaaagtcaacttgaaaagcaaattgagaaccaactcgactatcagaatacttgaatcattgaaaaccatggcttcgaataatcagagcgatacagatgccgatatgattacggggcaagagacatcctcattcccagcagtgtcaacaagctcgcctcaaaagcgggatcagcgaagtgtttcgcctgaatataaccctaaggctggcgaaaacagactacgcccggctggaggtaggtagtttgaaacttgtatatatcgccaaccctgctaatcggactgcttacagacatcatcaatcgcattacctgggattcggcatttgaacgcagcaactatgtcatcggattcgtggaccgatttgaaggacaattggaagtcaccatgggcagttggaagaaggagaccaccgatgaagaattcattccacagcatcgggtgttatatatccgacacatcaatggggacattgtttgggatcgaaggagacgtattgacaagatctttttgagtggaaactcggcgttcaacgaattggcctttcttgtctaaagattgaagtgaattttccgtcgcaccttctgtttttcctgtcccttcctaccttggaaccttggaaggttgacttctgtcgtccgttgtctctgtcattttagaatatctccaacattcatcacctcatgctgaatgacacaatgggctcttctaagaagaagccgtctttacctcgcttgaccaccaacatccccctactacagaaaccaactaatgcatcatgcaatactttgctacccaagacccttccggatgccagtgtacccccgatcatcatgccagagaggccggcaagaacttcatcacttttcaaggaggacaagcacgatgaggaaaatatcgtgcccgtcacgcgttttgcgtcagagagcatgcctgtctatcttccccagaaaagtgtggacgattcgccggtaacaaagacgaagaaattgtactacgaagatgcatttacggctcgtggatcgcacaactcccccaaggaccgtgtgacccatgaatcggtggttgtcgttgagctcaagaccaacaccaaggtttgtaacgtgctgaaattcgctcgatgattcctctatgctaacccaccaactagccaaaggataacatatccaagttactgtcagatttcgcccacctccttgctcaggtctaccagcgcccggagacatcaatgctagtcaccatcgaccaaaacgctgacttgctttttggaactacctccggttctgcatatctcttgaaggttactgctctctcgagtttgatcggacccctcaccaacctccgtaacacgggcctaatccaatcaatcatccaggaaatgtttggaattgcgcctgacaaaggagtggtgatctatatgcccgcgagtgaagacaatattgcaacgaatgggacgaccgccaggagtgagatcgaccgcctcgaacgaattaattccagcaataactcttcgatcttcaagtctctctcgcgatccatgagtcgtcgcatgaaatcgagcagtggaaacagtattccgatttccctcacttcagttatgagtcctgacgttgcaacccctacttcaacttctcctatcgcttttgcttcagatcaggcccctccgctgaggtcaaaccaagcagacgacaaaaagccactacaatcaccaaatgcggaacggacccagcaggtctcatccaaggacgagaaacctgaacgagttttaaagaagagagagagcctgaagagttttgttaaccgtcgcttgggcgagttgggcgagctgactacaatgaaaccattcacaactacaaagggaaagaaggattgactgctgtttgagaatcgcaaagtacattgcagtggataatgtagttgattgcattggggtatcttcttaacagggtttcggcatatggcttcgctgtgtcagacaattcagtccatatgattataccttgcatccttggccaactcttagcacgaaattgagtgaactgacctcttgtcaatgtaatatgtatttctgtttcgcttttgcttcttgaattctaaggtttctatatatcatgttttttgtcaagttgttagagatactttgcccgtgagacggtggtagtttagacgatcatacatgcacctatttctctcttatgatatttccccttatactgtccttacttctttcaaccccttatagggagcataagaaaatcacagttcccttatttactttctcgtccacaacacaacatcacccaacacaatatcacccaacacaatatcacacaacgcgatatcatgtctgactcagatgaaaaccaggctacagcgattgaacgcgctgatagtgatgaatcgctgatcttgatgacctcgtctttgcctgctgtcatcagctttgtccaggaaacccccggaaacctcttcgacgcccccaacggcgctgctctgatccgtgggagccccttattagggaccctttatttcaattagagcctcactaacctagtcaattcagatgcgtgcaactgccagggtgtctggggtgcaggaattgcccgtgcatttcgtgatcgggttagtcaatcattcaatcacccacttgacaccatagtgtagagctaacaaggcgatgttttatagtatcctgccgcctatgatatctaccgcaaccattgcctcatttacaaaggccacccagttaccaacatcatcaccgacctacgcgatgaggacccgcagccctctttcgttgtggaccatcccctcggcaccgcgctcatcatcccaccccagcaaagtgatatcctcctacactgccggcgccattggattatctgcctttttacctcccagaaatatggcagccacgtggattcggaggatatgattgtcaataacacttttgctgccctacaagacctgagtgaacagctacaagtgctttcccgacaggctcccgagaccagtagtgagcgacctctgagtctctactctagccgtttctgcactggcttgttccgcgttccctggaaccgcattcttaacttgatcaacacggttggtctgaacatcaacgtataccacccctttgcgttcagcaaccgccgcgctcgccccgtttgtatggagcgtcccagagacagttaccaggactgagataatcaaaggatctgtttcctccccatcagcaaggattttggctggtgggtttctacctggtggtgtgttgtggaggagcgagggttaactcattctcattttatgatgacaattgaagctagctaccatggaccgagcacatgcagataactttgatacacgagaagaacaaaaaaactagctcaaaagaaaaaggagaatcaagcctgtcgccactagcaaagtatgttgtagggcctccccttatcacctgacagcgcgtactgtagatcgcgcccgcccgcgttgaggtgtctctcgatttccccaagctttaccctcaccatatacctacgattcccaccgtattacctatcgcataccttctgtgactctctaggataccaatatgcccggtgaaccaccagctcaaaagcgtccacgcctccccttcaaacctcccagtcgtacgaatagctccgcgccaaagcccaaaggaaaagcgaaacaaaccacaaaagcctccacgtctactaccgtgcccaaaacaacaaaaagcaaatccacaagcattgggaaacgcccccggcccgattctccggcagctaatgccaatgccaacgccgcctccgaatccgaatcagagtacgattccaatggatcgggccgcagtcgttcgcgctcgctctcccaggagcccgactatatccttgctgaaatcacaactgcgaaccaagcagaggacgtgacgtccagcgacccaaaaataccttcgaagctgctcacacgcctactgcatcagaatttccagaatgagaagaccaaggtcgcgaaagatgccaatagcgttgtcgctaagtatattgatgtctttgtgagagaagccattgcccgagctgcttatgagagggccgagtcagatggaaacactgggggcaggggtcttggggacggcttcctcgaggtaagtcttcgttttttaatctcccaattggctaccattggtatgctgattgatattctaggttgaagatctggagaaaatggcgccgcagcttacgatggatttctagcctctgcgtttctactaccaagggtcatggcgttaggcgaaatccatcatcaactagggcgtattatttattgttcaagataccacagcattggcagaatacatgccacatttctaatcaaacatcttcacacgcaagacgctcgcaagagtgaaatatccctcgggttcgtatactcaggtggctttccaacggtgtgatcctcaacaaaaggaggcactgccccgaagccattggcattgtgaaacagtgcaatatctctgttaaccctctttgataaccaggcgtttgccacataggccgtgttctttttgctgagatgaacaacagcaacggggagcttgttctgctcgggtagatggccgagcttggcgtcgtatgctgtgtggcagatgtcgaagacgaagaatacccgcgttcgccacttctgagctgccaccagctttgttgttgggtgaacttcttgtgggatgtagatatggctttctttgaggaggcggacggcttttggcaggagggcctctgggttgttttgggctttggatatctgagaactccggtgcgagactatgaccaggactcggagggggtttccctgggacatggtgagctgaagatgtgaggagtagtccctttgaagggttgcctggatgggtccttaccaagatagacgagacggaatgtttggatcgtctctacgccttttctgtttgtgttcctcccgtgagggtgcactgctacataccaggttttacagggtcctcgagcagagttaaagtaaaaaaaaaaaaaaaaacttcctacatccatgaggcatatggggggcaaagtcggcgtctcacctggactagatgataaccttccaatggcccgacggtggatctggtcgttcaaactagaacatttgccaggggatggtcatctgccactgagtacaaacatgctgacagttaaggaccagggtcttgcttcagctggatatcaacgctgtcgggtacctggtgactgggttgagaggtcgggatgggactcgggtcagtccgacatcaaattatgtacaacgtagcaagcccgaagtacgcatcggagatggtaaaacaaaagtcagagataagacaaaaaggtccattataatttgaacgcaagctggatgtcgccgagaatgttatagttgatagtggacagaaggcggtggctagtggattttcccccgcgcgtgttttgtttcttcaacgcgtcaagcccagcccgagaagaccaatcttttcgcgatggatgatgcaacgacctccttgctcactgagcactttagttacacacccttggtaagcctatcgagactgatacgcatggactcgtgctgcatgcgcgacctacgagttgcgactccggacccaccccttgcaactaggaatatcgctgacagctccctagtctcttatagatgacattatcaactcgatcaacaatctgatttaccaggcgatatctagcttggagtccggcctcctcaatacgccacctgaacggctcggtttctcccatgacagcagtggccccagcatcgcggaaacagacgaggatggcaatgtggtttatcccgaggcgaagctagagatcgagaatggattgcatcagctagagacgctgctggagaccaatgttgataaggccttcgacaaatttgagatctatgtgctgcgtaacattctcacggtgcccggagacttgctctcttgggtgcggttgaagcactacgaggtatgtggaggctttcacagttgtctagacctgaacctgcttgctgttttgtaataagggatatactaatgcgccttgtgctagggtctctctttcgtatcttcgccagacacaccgacgccagaaaccatacatgcgcaacgcaagaagttgttcgagacaaagaaactaaaccggtcgctaaaagaagaacgcgctcgaaatgatgcggtcatatcacagctacaatctatcttgtcgacagttgaaacagcgaaggtagatggtgtgtccaagacagcggaagacataccagtggatctgtccttcttgacctctagcccagctgcacgccagcttcgtgttggtgtcgatgctgggtcgaatgctaaacccacacctcttacaaccaacactactttcattctctcgcagctgcccgcgttgcagacgacacttgaacagctccgaccgaaattggcagccctgcccaatgcaacggtacaaattgaagccaagtctaagagagatgagagaaaggaatatatcgagagcagaattcgactccatctcgagcgagctggtcagcttgctgtgggtgatgatggaaatccagtggtcgcaggtcgcagaatcgacatcagagaggcccacgcccttgaaagcgtggcaaacatgcttacgcaagacaaatctgtgtaagagaatgtgcgtgtgaagaatgttttgttctacgattctattattgaatatgtacaggtcgccttattaagaccaggtgatgctccatgtttcctgggtctttctaaaggggactacgtcagtcttgtctgactggaggatctccaagatcttctcgcccttcttctcgatagtgatgaattccttctgctcctccgggaggccatagaaggaccgtccgaacttgctcatgaaaccctcgacaatttctggcgtgatctcatcctccctgaggactccgttatcgcaggcctgctcaaacgcatcaatcacaacctgagtggtgtatggttgggtgaagactccagcagcgatcttctcgccaccacgcttggatgccgccgggtgcggggcgctgtcggagccaaagaaaaacttgggatttcctgagacagcagcacggagaagggcatcgcggtcggctggggtcttagcaacgggcttgcagaagcagaatgggtcaccggcccacgagtcgatgataatggataggtgatgggctgtgatggtaccagaaacggtgggaccgcacatcttcacggcctccacagctgcagcagtggtacagtgctccaaaacgatgcgcagtttagggaacttggagtgcagctcaaagagcttggggaggaaacgctcttccgcggacaagaccgtcacatcgcctccggaggggctttctccgtgcaggttcagaatcatgttttgtcgctccatctcctcgaaaacaggatagaattgcgtgtagtcgaccacgcccgcagaggaattggttgtcacacctgccgggtaactcttgacaccgacgatgccgcgcttcttagcttcaacgatagtctccgaggtcacggtctcgtggaggtacaacgacataaggaagttaacattcggctcgatggcttggaggcgcttctggtagtccagagcacggtcgacggtcgtgataggtggcacaaggttgggctatcgagtgtattagatataactcaaaagctaggatttgtttcccaataaagaaacccccttaccataacaaaaacggtgttcacacctccctgtcggatagtaggagtcaccaactccatcattggaccatcacgaagatggactatctttggtcagcttgcatctattaatgcccagaatttcttagtaccatggaagtcggccgaggcggggagctttactccctgcagcttggagagagacatgataaattccaatcaagatcaagctcaagctccaatggcaaaggttatatccctgatatgttcaagaaaaagtcgatctgcgcttttgccccgccatttctgaaaaaattctgccgatggcggtggccctatttggccattctccagattcttggattcttggattcttgtttctttatttcttgatttctcagctgattctaagcttgaaaatacaccgaagagtcagaggcaatgtgtgaccataacatgccgaactaatttgaaagaatattccagtcttacctgcgcatcctctccgcacggactactcaccgtggcacgtccggagtgtactcaggaagaaacagggaaacattgatattcaaagaccaaggcctagatccgttcaaggaatacgagaattcctcgaatcaacaaggcaagggtgtgttcctgaatcaccgttgccgctggtggcccccaggcacaattctcggcgcttcgccgtcacctatcacaggccacgatgaccatccttgggagaaattagattttccaaaagacaaatgagatcggttcttcaactaaaaatcacaagaaaaccccgctcagactctatatttaggtctactaggcgctttgttggttgcttgtcccccgatgtgtctgccaagtcgccgagtctgcaccctggcgctcaggcaattatactccggggatgtacaggtccagttgcaaggccaatgtttaaaattctagacagtcctgcaaattcaacctagagcctaaggcgaatcagcgcggtctattaccatcgaggcgccctacatggcgctatgcagtaatcgggctgaagatctttgggataagccctcattcggtggttactctcttgtgacagcaatagcgctcgctaagatagtccctggatcaagtttaggctattttccacgaatatacatatcccgcctggtatccgtcaataatctgagtcctgattgattgtatccgaaaagggtgtatgctgggaaaacaaccaaaggaatccgagcaggagacaacgcctctccccggagatttcagaaccaccaagtcatctcgagcagtatcctggggatggaatagggctgggaaactcggactgatgccctttatccggcactaatcaactggtcgggccatatccgcattatgacccacctaaatgggcctgatggaccgttgagtcaggagccgtcatatagttcaaagcgtccaatgcattgccactccagtttggctcgtcaaaagtgtcggtcaaatcacagatcggaacgtcatcgttcaccacatgagcggtttccgctaagccttgcgcaactggtagtgaggaaagtaatgtttgcaaagcttcaatggcctgaagcctccccgggcttgagttgctcgagaacactccattgtcaagatggagattcctttcgaaatcatgcccatgctagtatcaagcactggggacccatctggcttgaacgtgcgatatttgggttgagaatatatgcaaatctggatgaccagcatggatgtaagttcattatgcacggggggcctacctgtcgaacaataggccaaataagttctcttgaggaaatctggactctgtccatgaatttggcgtgtggcattggcaacatattcatcgatgctcaagatcataagcaatgtcaatgtacaacatactcagtagcggagtaatcaatggcaccgtgaccacttggatcatcttcatcaatcccgtatatctgtgatgagttggtttcgcacacgggacagaatgctgcccatttctggatacccacagcaattgtgccctaagcgacacagcatcagcttccagataataccattctagagggctaagcgttctggttcgtcagggttgtgggcgatcagcgggtttaatctcgcggggttgaatcaacagtcggagatccgaaggagtaacccggtcgatgcaacctcagaagacgtttcgtcaggcttcttcagacgaaaaccgtcggagtctgctttagcgctctaatgcgtggtgcatttctgtctagtcattggagaaaagggagaaaagcccacaattcgacttgccccgctcggtgatcgtcgcctacttcgactagcactactgtgcttcatattattttcaccgtgatgataggtgtagcggcgacatccgagaacaaatcagcgtcttcttatcggtacatgtgctaaattgactatgtgcctgacgatgtttatgccaagtatggtccctggactgaagcataaaaaccgtccgatgaccctcctacatctcttcagtcagctcagcaattcactctcaattcaatcttgacaaaatgttccaatctcaatccgcaaagggcatgttcgccctagcagctatgagcctgatcagcggcacaaccgccagcctcgaaacctgtgccagcagcaccgccttcagctgcgcgagctcctccacatcgccaacatgctgcttcaactacccaggcggtgccctcctccagactcaattctgggatactagcccatcaaccggtccctccaactcatggaccatccacggactgtggtacgtagataccgttatgaatacctgaaatcataaactaacccctccccatccaggcctgacaactgtgacggcacataccaggccagctgcgactccaaacgtgcttatacaaacatcacagcgatcctgcaagaccaggatctcggtgacctggtcgactacatggacgactactgggttgatatcaacggggccaacgaggacttttggtcgcatgagtggagcaagcacggtacttgcatcaatacaattgaaccgagctgctactccggctacaaggcgcaggaagaagtgggtgatttcttccagagaacggtcgatctgttcaagaccttggatacgtacaaggtatgtcccctctctgcctttcattatatatgctgttcgtttctgactgtgtgccaggctctctctgctgctggcattaccccgagtacatccaagacctacactctcagcgccatccagaaggctcttactaccctgcatggtgcgtcggtttaccttggctgctccagtggcaagttgaacgaggtttggtatttctataatgtcaagggcaatgctattgacggaacatacaaggctgtcgatacgcgtaagttttatcatttgcttcttggttggtgctttactgacgtcttggtcattctagtcactacttctagctgcccaacgactggcatcaagtatgtgcccaagtaattaaggaacagggcttgatgtgttctgttggtgattgtccttgctgagttgcacactgaaagtgttgctaaatggtatctctggattattgctatacatgttgatatagattcgaattctcgttagtctcatatgatgatcgttttgcttgacgataaagtctcactgggtatagatgtagaccggtgcttatacggcattgaccacgtggtcacactcaggcgcgaagctttgaggcaagaatgtcgtaaatgcatcctggccctgtagtggacataaagcacaccgtagtattgggaatcggcgaggtggcgggaggtcgagaggtcgccctttcaatcggagtcgagtgagccattgctcaaagtagaggtacccgccgagttttatcatcgcaacgaaacatagcttgcacaagtcttgcagagatttctgcaataacacaactatgtatgaagccatacacttgttgcagcacgcgacaggaggaagagtgtgtttgaagccagaaggggtttgggcagagagcgcacgagtggtgttttcatatacccttgagccgtgcagcccgccgttcgtcttccctcttgtcttccacgcgacccaagaaatccatgcgaccaatataaccttccttagctttgctatgtgtgcgcagctcgtctttgataccggccgagtcgacgtacgaggcccagtcgagtcttgacttctccacggtgttgatcttgggtccgcgcgcatctttgtcatcggtaacgagttgcttttcccagcttttcttaatcgtgccggtcggattggggtcaaatcgcgatatcttgcgaagcggtcgccgaaggttacgagcggcatttgcggctgcagcatcctcgtcggtatattcgacattctccccactggacaaaaacgctttagcctccgccgagtgtttgggcacgactttctcctcggtgatccattcgccggcaaatttgtaggtgcgcttgatcttgatcatctggtcggcgtgcacggtatggcctattttgtgctccgcatcttcggcaccctggtcctgtcctttggtttcgcctgttggttcaggttcttggtcggattcggatatctgctgggtctggggtggctgcaagccggtgtgggtctggggggcattcatctgctcccatagagcgtccacgtccacggtcgcgccgtcgatcctggccagcggtttgcgctgttcctcctgtctgctcgtagaacgcgtattagaacccaatattaagtcaagcagcattgataataacttaggacttacatgtgttgtttcattgcgcgtgtccgcacgaatcccccggttcctccttcattgtcgtccaagtcaatgtcgccatcgtcttcgtcgctatcgcgcgcgtgttttcccttggccttcttccccttggccttcttatctttcttctcccttgcttttctaattgtagcctcatctccagagtcgagttctgcatccttggggatctgagattgggtgtctgtctttcgcttcttctttactggttctgcggcttcatcggggtcggaagataagtcggagtcgtccggtgccgcgtctaagtggaagtcttcatcctcggcggagtcatagtcctcctcatcaagatccagattttctggcaaagtagcatttgccattgtcaatcttttctgcttgactgggcttatcgagaggtgatccagatctttaggacaaggcgcaacaaggtagaaggatgaatttctgccgtaggcggtgtcgcagctatgtatgtcatctccgttgactccattgacaataagtatgtacatcttctatgcacatccatgaacatctagacagacctctagctttcagaggcacctgtcaccatcatttatttttacaaccaaagctctatagcagtcgggaaaagcataagcccctccacagtaatggcagtcccaatgtcgaaacattgaatgcatacaggcctacacatgtggatgtataaatgagttaaaagacttggtaattgattcaatggttcatgatcagtagaagagataacaattcacgttctgatagaagaacagcgaagaagaaaagcctccccaaaacggactgcaagagtgcaaggaacagaccgtccgacgggctattcctcttgggccaaagccagaaacagattcatcttgtcatccagattcagccgcaaagggccatcgtactgagatcgcacggatttaaggtgcattggggtctataatacatatgatggttagtattatcctagtatcgtgatcggaaggcatgatgagaaagtaggaatggagggatggccatcaataaacaactgttcttaccttcgatctcctccagaccagtctggggtgcggcccaccaattggattcagcattaacaacaggctcggggaccacttcacgggccacgaggttctgctggttggcatcgcccgctgcagtgccgtggacagcgtgaccacggtgaacaccacggtgagcagcacggttagcagcacggtaagtaccacggtgagcaccacggtgagcaacacggtaggtatcacggtaggtatcacggtaagtaccacggctacggccacggccactgccaccacgatcataacggctgcctcgcacacggagagggccaccttggcctcgaacccgggccaactgttctccacgggccgcctgatctccattggcggcgccatggagggcaccgaactcatgctgtataggtcatgcacgtcagccatcatgcactgctaccatcccaaagaagaattgtgtgtatgagaaatgggggaatggggtgaatcttacaaccatctgggcttgaactgccagcagggtgagctcggtaacacgggcgtcacgagcagccgagggccgcataccttcctgctataagtgatattagctcagaacctcgaagctcgggctgaatggcaattggggtcatatcgtacatcaacttggcgttgaatggcctgcgacattagctccatgatgcggttggcaaggaaagtaggggcagtgggagcaataggctatgaataatctcagtattgctctacaaaggttccagtagtcaatggagcgttcaatcggcttacattgcgccgggagcgccagtcatcctgccgacggcgctgggcggtgctgccgccagggccggcagggccggtaggagggacagcctgctccttcattgtcacacaaagacagcagagacaaaggaataaagaaagagatgagtctgctcgctgtgtttattcacagcggatgaaaaggtgtgttgtgaagagaaagggaagttcagcgtttacgtttacgtggagctggacgtggacggagttttcacgacaatacgtgctcatatttacgttttatgaccaagatattgctcggcgtctttgctcggcgtcttttttgattgaaacctggagctcccctctagcttgcggctaatgaatgacttactagtttcctgccagacaaaatccctaatcggcatgatggacaacaaagagtgttgaatcggtgccttctgactctatctagggttagttgattccggctttgaacacatactctctatggctaggtatattctggccaaaagcattgagggatgttggtggcgaagccgtcgggagaaagaccatgctttgatttcctatggaagataaaggtctatctgaccagaagaaagacctagaagcaaataagaaaggcagccatgcctctagcagcagctattgtcactaatagctagagtatacaacgagaacaaggattgtgaagtctctttggtgatggatggggtttgaaagatggcaagtatgaggactcctggctttttatcttcctctatgagcatactgcttgtggatatgatgacctcggcaactctgctagtatgcatggagtatggatggatatatggtggagtcggcctataagcagccgcgttgcttgtagtaatggtaactgcacatttccgttgatttcatataatcaattatatatgtacttaacgaagatagaccaagcactcctatggccttcaaggcgaaatgagacatggctgggttgttgtacgtacgacgactcgggcttttttagtctgaggtcattatgttgatctagcttcagcaggtacgatttatatcgaccttgtgatataaaaaggcgcgaagtagttggatttctattatctttctgctatggtagactacatacagggatgtctttgacagatatcatggcgtatcttctaagtatagaaacggagaagatatcgacgagggatatttggggaacttatttgcataatgtgattgtactgaacatttaaaggttcctaatgcggctctggccattcatcattggccaacgcaagcagaggattcgactcgggaatgtaacccagatctctggaatgcgacatccgaggaagttatgatgccggggaagaacatcatattatcacctcccatggtacctcgcaaacttttctggatcagaaaaccgctttaggcgaaattgtcctcttctggttcgatcttttatcttcaaccaaacttgttgtctagatgttataccaatccggcacacgcaaagagccaacctttctggcttgacttagtcactgttcctctttaatcttcgtagctttcttgatcataattgcgcagaaaatatggtgcctggttaagaatgtgggccctggtatacttttccacgtgcgagctttgtacaggctcgtgtcagcgtgccgggaatagacacggccttgagagagcatttaatggttccattgccttgaagatggatgtaacgttcaaaatcctggtttccacgcgcccaatataaggtcttaagtgaatctgcttgaacttgaacttgaaatttaagtttcaacctctgatctatacctaccagggtgcatattattcaatataaatttgttcaatatcccaatgcattcttttactactcatctctcccttctatttgctgcatcggctacccttatcgccgctcaagatgccacatcccaaagcacaagcggcaactcgaactgtgcttctcaaaagtaagctcataagcctatgaaattctgttgagattcctttctcataatcaacagagttgtagattcatgcgttgcgataatgaaacgtggactcgcaaagtgtgcctcgaatgattgggactgcaagtgctcgggggctgcaaacattgccaagtaagtaggccacctacttgactctcgtaattcctcaatgagatgtctatacactcaacaccgcagtactgatataatcgagcagctgttacgtagattgctccgatgatgacccggattcgttcgcggccaaacaactgagtgtaaatgattgcgctaccgcaaatgcatacgaccaaggagagactaccgtcgcaccctcgtggactcttcctggatcaaatgcggcacagccaaccgacacagatgctactttgaccactagtagcagctcgtctactactgccggaccgactaaaacctttgcgaatgagaagtcgacgagtccatcagagggagctgcggttgtgaatgatgctggtagttggatggctcttgtggttctagggctaggggctgcattttgagactggggtgtcagaaggaagtgattaccgagtttacgtgattattagacctaattagatatacttgtaggattgcattgacattggaatattcattctgcgatataaataatggagatggcatatgtggagcaaacaacctccttgagacttagactagatacatattcgccctacaccttggttgcaagactaacccttctcacaaaataacagaagccacagaagtaccagaccagtgaattctcacctttcattaatcaatgcccagcatagataaccatgagtacatcccttcctttcaacagagtaaccattataaatcaacgaagcaatgtcacgcttacacagcgcttatatcctcccggagtcattctctcatcaattgcgatacacctgcttagtagcaatctccaacttctcgagttggaactgctctgcccgatgacgagagatatcccgttggaaccacgtaccaacagcagcaacgaggcccatcagcacctccattccaacaagtacgcacagcagcacaaagccagcacgagtattgatacagtcacgatcgaagtggcggggtgtattaatgctgctcgtcccgtttttccacttgcaggtccagctgtggagggtttccttcttgttgaaccctgctgggtaatcggaggacggcgggtatattatgaacagtatgccggccagggcagttacaaaacctgcaacggctgaagctgaggcatagttgttaagtgacttgataccagaatgcggctggatgagagttagtatatggaatcaaacacagtgcagtggaagggtgtaaaactcacagatggtaggagggtaagggcgatgtacaccaagttcaagatggtgattatacagccacatgaaatggcggcggttgttggacgaagatcaaagttcaaaggccacagtgcgaggccggcactcgcccactgggaggtgttcttataatgtcgcaagggtggggcttcgcacgcgacgacggcaatagcaacgccgaagattgaaaaggatagaccaagtcgtgcaaagtaaaggacacgattgcgtttgaggaattttgattcctccatgtatgaagaatgagcaccgcctgatccgtctagggacgagtttgagatcatgatgagagtgtcgttgggtttcgtgagatgataaagaggggtcgaaggagaggaagtgtgtgtaactgtcaatgattaccttgctggcaaggatccttctggtaattgatatgaaagaacgaagaaaccctcgggacaatgatggaaaagtggaaaaagcaaaggtaggtactattttcaaacaactgtctcggaagcctcgtttcactatcggactgggccaaacacttctgttgtggtggtcacgtgtcgatcacatgctaatgcctgggctatcaggcttcacatggctaattaactagctagatctcgatcattatagataatctaaccttcttcatctctctctcgctccaagaactttctagccatcgataccgtcaacactgaaggtgccgaggctatacacgtgacgctgtttacttagtactgcagtggggtttccgaccagagcaggatgaccaatcggtcatgtgatcactaaaagcactctcggcaacgcagacacccagcgacgactctgctctcacacctgtttcgcaggcagggctgtcggagctcctgtcccccgtggcagggtcccctcttcagtatatatatttatgatcaaggaacccgctgaccgggtctacttattcggttcccggaataacatggaccctggggatgtcccgacgtttctcccagagctaacccaggtcgaggaaatgctggtatctagggtacataccattattgaagtcagacaggtacgtggccagcaatacttttatcgcggccacgtggctcatttcctgaccaatgtacccgtttcctaaagatctttttctccgtctttcgctgcccagatcgcaagaaaaatggcggaggcgtttccaagtccgcgtaagcgacgccgcctcctccaggagtcggaggttaatgaaggggatatggaaattgaacactacgtccatcgaactgatccatttcgaagcattagcttcccgaatcccgatccgacagcccttaacgtcaccaccatgaccgctgaggaagatcctacacaacatttgcaccgtggcatcttcaacaccctcgaccagtatggtctgccagcgaagtcactttttcatatgttgaatgcaactatccccggtgccagctttcctctgcttcgcgttgttgttgcgagtgatcattcggctctagtacccctggggtccatcaaagacaatcttactacccttctcgacaaccatagccttccacagatttaggtggaggtgatcaacggggaccacttttatatccctactttgttcccgatccactcaacagccgagctttccattgcgtttcaccatcttaaggatgagatcgtccggcttctcgacgagactcttggaaccaaatggcaactggtttgtccattcaacattggcagggattcccgttccgcgcggccagcccttggtgttggtgttctaccctcaacaaatgcaaactggtatcagcttcaagcccacctgacgcatcgacttacatcacacatccgtcctatttttacagacatcgagttcctccctgggaaactcagcctccttggggagggtgatcctgtctcatttaaagatcgcgtcaaaggtcctaaggatattcagatgggatgttcaatcggcgttcgaggaggtaataacgctagtaccttaggaggctttgtcgcggttacatatgacggcgaaacgcaccgtggcctcctgaccaactaccttgttatgcgcccctcccccccatatgctaaccttgatacaatcaatcgtgagggcgtatctcctctctcgcctatccccttccagggggcaatcagtatagaatctctagccaggatagaccgtgactataccctgaccgatcttgacgaccaactacaagccctggagacacagaaggctcgggtcgtagacttcatccggcaacggcagctcactagcgatgcacctcgcgcatcctcccaacaacagcttgaagccgttgaaacctgggagaaaactctgattgcaacgcgcccagtcatccaggcgatgccacacgtcctaggtgacgtccattctgcgtcgggcctcttagtccatggccgacgtgttattgattgggctttcgtcgagctaaccccggaggccgaggagcgcttctttaggcccaaccgaatgcccgaagtcccaaggaaccagatgcctcgaagcggcccctccggtccacctccggctctagtcgcagcaggcacccgtctcgacgaatttagctcgttacaggaagacacgtactatatcaaacaagggcgcaccaccgacgtcacaggtgtagtgtgcaacggtgtgctgtctgtttgcaaatgggcgacacgatacgatatcaatggtaataccgtcgacagcaaagatcttcgtacggaggaattcatgataataggtatccaagatcgctttattgagtttggtgactctggctcatttgtcgtggattcgaccggggccgttgcgggcctcgtattcgccgaattcaaacacaacctccaggctgtcggactcgcattaacagtcccggatcttatggacacgatggagggtcgacttaaaggtcccgtctctctccgtctcccataatttccttgcttccatctgttttcattgccggaaacgtatttacgcaagagtagatcgcttcaacatcggctatgatctacgaatctcaacagagatagtgactggttcttcggaaccatggatgtttttttccaaccgacaatgatattattcttaatctgtctgtctttatgtggtttgaagcggtctgcctatggtcgtccttcgtggatcacagcgtgattctagtctatctgctcatcttcctatcctccgagtttgctgcctcctgattgtcttcgcgacggattatactggctacgcatgcctcttttatgagaatattctgctttgcttcatttgctaatggaaattgctctaaattcattgcgacctaataatcttgaaaatcgagtaaatatccccgaatgcatgtatgcacacgatcgctgtccccccgccgtagtagtaaatatggtgtattatgcatatgtagagctaggttctatcgcgcgtaatcatcacgcaactatatagacgcagactaagaaaaagatagaagcaatagcgttacagctagtctcaagttcctttggacattgatttcttgccgtggcgacgggctacttgcatattaagatactgctggcacagcgctacagccgtattaggcaagggctctcttagcacttgattttcaatacgaatgccattttctatggtaatcggaaggggatacagctaggttcagaattgactatgttggtttagtgctcttcatccgtgtccgtttccgtgtctgtggagatacaacctcgaactcagcaagtccgatcgatccctcagagcaggaagcaaatcttaatggtacaccatgttggcatcggaagatctagcgacattcatggcgatatctgaaatagcccgagcacactgatcaacaggcaatcaactcagccgctcattaagttcctgcaatgcgcccgttgtcaatgcacttcgaaacgtaagtgcaacagcctcagcctcattccattgcgcgctaaccatatcgccaccaagctggccgattctcagaactcgggcttgcatgcccggacagtttctttcacaatggttaacattggacaaacagggcaccagtacctaggtattttcaagttacttgcagagacatgattttactcccaatactcggttgaattatgaaaagaaaggtatcgagcctactctaagaagtggttcatctctcactacagcctcacgatgtccgaataaacgaggcaacgtagaattgtagtagaatcataatccaccatgtcgattttgaccatagcggagcatttcactgtcttggcttcttcaatctcttacttttatctcacttgttgacaactcttactatttgacttctctcaattcttaataacgtttacttcttaactcatcttacttcttgaaaactctcacttgttgagggtatcttcgcggcgcctactccaaacgcttttagggttcccagctgcagaagttttgtttttttctttctgtagaataggaagctatagacgtagttacgacgtagttggtacagattaagcaggcacgatgttgcgtagaggggtatatcgtgtttcccccagcagcgtaaacttgtattcacaacatcgcagccatggcaagcaatatcaccaacatcattgttaatgtgttcccggacccccgtccacccacctccgcccaatcctccccatctccctctgcctccgggaccaatcggtccatgggccagcagttggtggcttcaccgggcttttgggcccttatgattgttgtcgccggatgccttgctggcgctggctattttttttggaggaggccagcctccaagagcgtggacattgagggtaccccgtaagtggtaaaccatgattctcatggaaactatattggcgggtctttgcctatgtatgcacagaggctaatatatcgtaaaatagcctcaaagacatcagtgtgggcgagcagcccaagcagaccagcgaagaaatccacacagtggatgatgtcgaggcccatccgcctcttgtgacccccaagactcccaagacccccgcgccccccaagaccctcaagactcccgaggcccccgcgccccccaccacacccaagaagaagatcccgagctacgcagaagtggccagcgccactacgacgacgcgcaatgtagcacacgggatagagaaggggctgtcaatctcggtatgctgaggcgatgccgaggcgacggcgttcctctgttgttttatccttttcttctctccgagaacctcagtgaggtgagatgaatgaaaacggagctttttatcaaaccgggggtggaggaggaggtgttttggcggcgttcctctgttgttttatccttttcttctctccgagaacctcagtgaggtgagatgaatgaaaacggagctttttatcaaaccgggggtggaggaggaggtgttttggcggcgttcctctgttgttttatccttttcttctctccgagaacctcagtgaggtgagatgaatgaaaacggagctttttatcaaaccgggggtggaggaggaggtgttttggcggcgttcctctgttgttttatccttttcttctctccgagaacctcagtgaggtgagatgaatgaaaacggagctttttatcaaaccgggggtggaggaggaggtgttttggcggcgttcctctgttgttttatccttttcttctctccgagaacctcagtgaggtgagatgaatgaaaacggagctttttatcaaaccgggggtggaggaggaggtgttttggcggcgttcctctgttgttttatccttttcttctctccgagaacctcagtgaggtgagatgaatgaaaacggagctttttatcaaaccgggggtggaggaggaggtgttttggcggcgttcctctgttgttttatccttttcttctctccgagaacctcagtgaggtgagatgaatgaaaacggagctttttatcaaaccgggggtggaggaggaggtgttttggcggcgttcctctgttgttttatccttttcttctctccgagaacctcagtgaggtgagatgaatgaaaacggagcttttttatcaaaccggggggggaggaggaagtgttcttggtggcgttcctctgggctttttggccgtttttgcttctctccgaggacctcagtgaggtgagatgaaggaagaaaacgagacttttgtctctactttttgttgttttgttgtttctgttttctgttgcttttatttttatttttctttggctggtcctcttcggaggtgaccatgtctaaatacatactgccgccgggtagtttcatcttgggaatgcattttgctgttcaatgtagaccccttcgcagacctggatcttatggtagaccctgattgatctaacacgagactttgaagaggccaggtgctaaaatttcctttatataaaagttttctcttagatgtctcctagatgtctcttacctttggctcccattatttaacaatcatctttttcttaaactgtaacgtccataatagttcagaacttttagggaaatatttccgctatagaatctaaggacaatcactagaagtaacatattgaatgaattaactacatcttgctatagaaacccaagcatctaggtagtaaaatttcgagaatatagggcactagtccctgatttatatatagcttcatacacggggtgagagaagtgttttcaactggacagcattaggagtttcattgagcaaatccattcatattgataattcacgacgctttaatacaagataaacagcaattttcagtaatctcatccaatgacgatcacttctagtgagacccaatttctcctgacccttaaagtcgagctaaatatttccaaaatttcttcccaaaactccgaggcgattttgcgatagcaccatcactcgctttccgaacactagccgccatatcataggatggagggctttggccaagtttgtcattcatattattcacctttgaggactcaagtaaccgtccagaagagcaaaagtagtcaccgcgatcctgagagttttgggctagctctcttcgcatctggctgttgggattctgctttaaagaagcataagctcggttgaactcactgtcggagagtctttccatagcgatatagatttcggggtttcctatgcgttcttttagaacatttgataactttataaccaactgcatctcctctttcaataacagaaagaacttttcaaggtagtctatcattggcggggtaccgtcgtcgtgcgtagggtgattctctgctaacttttcgagctctgtctctagttttataaactgttgcagtagtaaccggcgagtacgctcgttctcgatgacagaggtgagtgcatctgggctcggctcgcataagtggtattgtggagaagggtgatagtcggagactagcttcaattcttggcttccaagtagttcggacattttagagataatgaaacgattctcgtgtggtaaactttggtataagatagagaaggaatattgaatataatttgggatcgaggtttgaaatagtagaaagatatatctacctgggcatccttgatacgtatactccttgccgccgcctaataaggaatggatctctacctaaggtagcttccctcccaaaccttgggactaatccgagcccctctcacctttagcaattaatccttgatcatgctcaaccagggcgtgatcggtaaacttattttgcgcgtttaccagacaaaattggcattgggtccaaacctagcgacgccgaattatatcgttttggaatcggagcttgtaatcaatacgtcacgaagtcacaattcttaatcacagacagtagccctggagtcttttcgctctcaatattacaagaaatccatagaccagattgactctcccgatctactcatttttacatcgcgtatgtatccaaatcagtctcctgcttcacgctcagcatcatctttcgccttggaggctcgaagatgtcgcaatgtggaaagatgctcctcgggctgcttcatattttttggaagaaagcgccaaaatactccacgatactttgtttgaatgagcgcatcttacagaagatctaccgacacctctcactagtcgatcaagtttgtctatctctcagctgcaaagagctcttcgccctattcgggacgattgtgaagcacaacgatcttgaatttccacgactcttgcttattagaaatccaatactgtgcgtgaacagtcaggatgtgctgcgaaatcaactccttcttcgactcgaaaatcgccgctgggcctactgtgcaaagtgcttgaaacttcatccacggaaagaatttgcaaaatatctcctgagacaatcagccctggagagatcctgcgtatactatgctggtatagttgacctatgtccctgagcccaaagtcaagatcctcaaatcaagcacaacgccagccgaaaccaaatatggcccattcgagtatgactatgacaatggagaaacccctagcctcggccacgtctgtatgtttagcagatctggctacgatgtgcgagttgctctggttttatatattaataaaactggcaagttatgtgtagcggctcggcatactataagcttctcctcctccgcccatctcacagctgagccgacctttgcttgttctcatcaggatctcctatctctcgtcccagggaaacttactgcaaaagatcctcacacgtaccacattttggctacttcaagacctcatcagtatctcatgtctcttgtccccggggagctggtcccaaaagtctgtcccatttgtcagactttgattacaaaatacgatttgcctgaggatatgatgaatcaggctgttttctgggtggttcgagatttgggaagctgtgaatggcctgcagaccgaccttggtttgaccagtgtcgtctcgccggagcacggttttcacttaatgagatatactggtgagtttatcaaaggatctgtggagaaagaagagctagtactgattcccatataggtatcggtcgcagaacttgaatgactccagggccatgtgataactataaaagtaccccagaggcaggcttagacagcttcccacttctcttctcagtagtcaccccatggtattctaatgacgatctaactacgttgtatctgtaaagaggaaaacaactagtgtagattcggctaagatctgatggacaagagggagagagagagaggaagagggagcggaactatctagtgatctggacccacatgggtgaccgccttccggtcacccaacatattctcctctctagcaccctctcagtaacaactctgctctcacacctgttttgcaagcagggctatcggtgcccctgtccccgttacagggacccctcttcaatagctagacatcaaatgccaaggttgtacggagtacccgtggaatgcatgccacaaggaccgtgcatatatgcacgccataccaaacatagcttagcgtgtaaccttgatgatctataagtgctcgacgacctgcatcttcaatcgacagcatggtgcatttatatgagacatagctggacagaatcagagatgggatacaatggaagcgtctgggtcgatgcgtgagagtcgcaatgatattatccagtggcttaagcatgcagagtgtacactgttgcaccatctcttaacgactctagagactctctaggaccacactactgcctcaataatcatcagaagtaggttgagcctccagggtagtcacatgacttgtatgttattgctattgctattgctttttctttccttacttacctacattcatttatcctttagaggactcaaccacatcagaacacaatcacttcgacatgcctggtaactatatttatcatccaccacatgacttgtatgttctcaatgtctcttttgttctcgatgtcttttttcttttctgttgctttcatatacttacacttacacttcagacaaccctaccacatttgccctccgtcttccactttatgaggtctattctcgtctaatttcaatgatctgatttcatgtgctctcatcatactctacaaattggatgaaatgaggctgactggaccaagcatgtggtatcaaccatatccactcgaccacgtccagccttgccgtgacgagttatggttccaggacagcaaacacaaaacacaaaacataacaaaaaaacaaaaaaaaaaagaaaaagaaaaaaaacatccaagcactttcaagcatcaacttcaaacaatcatccacttcaatcaaccttcaaataatcatcccattcaagcatcaaccgtcaaccgaccatccacttcaaccatctacttcaatcaatattcaaccaaccacttcaaccacttcaactacttcaaccacttcaaccacttcaactacttcaactacttcaactacttcaactacttcaactacttcaaccacttcaactacttcaaccacttcaaccacttcaaccacttcaaccacttcaactacttcaactacttcaactacttcaactacttcaaccacttcaactacttcaaccacttcaaccacttcaaccacttcaactacttcaactacttcaactacttcaactacttcaactacttcaaccacttcaactacttcaaccacttcaaccacttcaaccacttcaactacttcaactacttcaactacttcaactacttcaactacttcaaccacttcaactacttcaaccacttcaaccacttcaaccacttcaactacttcaactacttcaactacttcaactacttcaactacttcaaccacttcaactacttcaaccacttcaaccacttcaaccacttcaactacttcaactacttcaactacttcaactacttcaactacttcaaccacttcaactacttcaaccacttcaaccacttcaaccacttcaactacttcaactacttcaactacttcaactacttcaactacttcaaccacttcaactacttcaaccacttcaaccacttcaaccacttcaactacttcaactacttcaactacttcaactacttcaactacttcaaccacttcaaccacttcaaccacttcaaccacttcaaccacttctaccacttctactacttcaaccacttctactacttcaaccacttctactacttcaaccacttcaaccacttctaccacttcaactacttcaaccacttcaaccacttctaccacttcaaccacttcaaccacttctactacttctaccacttcaaccacttcaaccacttcaaccacttcaaccacttctattacttctaccacttctatgtgtataccttcgactcgccgaggaagttgcaccttcctcgaacataagcgaggagcactctttgcatagtttgcagagaaggggacgcacaaaaccagaaggaagagcacagatggttttccttttctcttctctcttcgtacttggtatttgttcgaaaatgcactcatttctctgaattgatctggcaggtaacaatggggaggccctatatattcatgattactgattaacaataggtttttaaacctgcacaacccttcgatcccccctccagccctcgagtgctccggggtaattgttgtgacagagacacgccccgtacctgtccagtcgtctcctctccgccgtcgaggggccattagatagccaaaaccacctgtcagagaagatcatccggtaggattgcaactgcaaggagcgtcgagatgacagatttgcctacgcaagtttaacagagcaagggggtgtataattgtaagtgaagagtacttgtcatggaaaagggctaatatagtatcttggcagattttgaagagagatgccagagccagtgcatcgaccaggtgtttttactgtttttacttttttttagcttctgtggtattctttctcatattatatacatgtttgtctgcggagaattggccagcttgagtaccttcgcccgtaataccacacacgggatgaaggagggtatgaaagagggcttggaaattcagctgccggctgggatggttggctgaggtgatgccgaggcgacggcgttcctctgttgttttatctttgatcacattttgctggtctctcttattatgcagaaaaagaaaagaaaaagaaccttagtatgcaatcatgcattccgaagtgcctcacttttgatagatacgtcatttgtatgccactcaaatttctattagaaagttgcgcttttaattttaatatacccgtcatcctgacaatttctcagcggtcagtcagtcggttccttctttgaacgcggcaaacttatgaaaccatgatattcctggaatttgtggaatttatggactcagcagctcattttatattctacatcaccctctaatcccgaagccctctaatagactcaacagccttgagtgaaacggtatttgaagatgagctgttacatatcgggggacgaaactgatgaagagattgatttagaagaatctggagagatatgtcttctttaaagataccgatacaatactttcgaaaacggactaccaagaaaatggcctatcgatctaaaggggatattggagacagagattgcacttcgggagaattctcaacgcgagatagccttgaaagagaaaatgaaggaacttgctaaggaaagtatcaatgtgactgttgttcaagacttacgggaggaattgtctatactttcgaagaaatattggaccttggaacgacgttggtggaagattaagtcttcgattaatgacagcccgctgaccagaggtatcgattactggcgttcacagccgaaatggtacatgcatcgagtactttaggaagattgcgttgggagaagaggatgttgctgtagagactgtggatgctgttctaatcgccagttagaacagaaatttgcagttggtcattgcaccgtggagtgttcttgttgtgagaaatcccgggggtttgcactcgacccagagcaaaaatcccaaattcaagatttcttcaagtttgaaatcaacggcacaggtttctggtattacgatagaatcaaactcgcttctctgctagggttgatggtcggcaattacgaaaaccctttggatctcatcgttcgcttgccgccaagatatacacctccctctgaggaatcacgaaggagctttgtgtcgctgtcatcacttgttagcttacggtctatggatatttccgaatgaagcacaaagcaatggagaaagataatggagagagtggatcgaaaaatgtgtcatcattgctctacctagctagctttatagctacccaatccgattcgacacttcctggctgctgtaggtgctccaatactccacatagcgcttggtaaaacgatacaagtccgctcgattttaaaggaaaagaggacatggatcgaaggtttgatcgcatctaagcacaactatattgtgatcaaatctcaaggaaatgaaaattactagcgcggtaatctgatatgacgggtaacggagatcaggtggagttccgcgtggactcaaaaggttctgggctctggcgggggaaaatacagcgtattttaccaaacacggtcatatcccagtctagttagccgacatatatgattagtcagaacggctgtaactcagcaccctaccgcatctataatcttcatcgctcactcctagaatcatggactggaataaccacactgaacataccgatagccactacagtcccgatgcggcggatacggagttccgctgcggtctctgcaacaaggcatacagtcgccgtacgttgatctatgtgcatgggatcgatctgtcgtttgacgcatctgataggagatctccgagaccggcatcggcgtcggtgtgccaaaactttcggcaagcaacgcgcatctaagcgcaagtcttgtgaaacttgcgcccaaaagaagttgcgctgttcattgactcgtccagcctgtagtcgatgtgttcagatgggcaccgcttgtcactatcctaacaggtcctcggcgtctctaatccagagagatcaagatacaggcccggagaatgtgtcgtatctggaaccaactctaggaccgacatccacgggtttaacccccgatgtccctgtttcagccatgattttgcccgaggatgccagtaatagcgctcccattatcgatgacttcgcctggagcccaacactcaataatatcaattttaccgttgatgaaactggcttttatgatcaggccacatggcctgacccggcatcagacttcgtggatcatctatacagcccaacgtccttctttcttacaccgcaggaaaggttcaaggcacccaattctctattacttccgggagatctgataggcgtctccctaccacccctatcctccccggcgggtagtggctaccgagagccgtccgactccgacttctcctaggatattacaaatatatttgccagctccttcctcccagacttgtcccatctagcacttcgagacacatccagtctatctcaggagcttttcgggatcctgcgtgagtatccgcgaatgatgctacaacccaacttctggtctcccttcatccaccgccgtctctaccggtgcgctgagaacggcatggccgagcctctcggtattgccctggcctgtgtgtcggcctactcgaactccgtcgagtccagccttgagttcgttgacaacatgatcaactcggaacgggagcggctggtccggcaagtttcacctttacagcgatcgtccggaaacctgtctcgccgccctgcatgctgtttgcatgtatcagattttgggactctttcgggggccgtccatggacagccatagatcggggcatagcacgttcttcaaagatgggcgtgaagggcgtcgcgacgacttgggcaaggccgcagaacttcacggttcctttttactgaaggtgggtattttagcgtttctcctcgttaccctcaatctacaccgctcattcgccgatcgccgtacagatgactcggggactctgcaagctgtaccaaaatgctctcgtcaggaacgaagcaggctggcccgagtggaaatttgccgaatccctccgccgcaacgtattcttcgtccacatcattaatatactcgccgccgaagctcggaagctgcaccgtgactactttgagccgttgaatgatgccatgattctacagatgccccttccagcaccggagtacatgtggcgcgcctgcagcgatgaggaatggtcagtggcccgcgaatacgctcgcccgacatcacctactccgtgtacgctccaggagttgcttgacctgaaccttgcgggaagtttggacgttgcgtcactacaacctttaaccaggatgattttggcgtgtcatagaattcggtctaagtttaacgatgcggatgattaaatgagcatatgattactctattctttcatattctttcgttgtgctctctaatcccttgtctacttggctttctggtgtcatattggtgcaagatcacaaggtcccgcgggcttgacgtaaataggactaaactcagataggaaaagaagcggtttaggttctagcggtaattaaacattcagactacccgaaaaaggcacttataccgctgcgtaatatcctctacgcactctagatagctggctcgggggagggtggggcgacgttgttgatggaccctaagcttaatttaccatgggatctccccttttctgtaatttccatatgtggacttgcaaccatgtatcaatttattttacttaggcactcgcacaatgctactgattcggaaacggacgaggtaaaataccctactgcaatggttatggtgagaactttgaacgctaaatcgtgttcgccattagaatatccaacctctagcaatcaaaggagtccaccattcagtatgaccctcattgtggagtgtcccccattgactcgccctcgcaacctctctgtacaattccatatcgataagactatccttgatgatattcaagtcaagcaaataatcttgtctgccagttccgtgaagtgacagcgataataactggcggcgtggtggcacttacgaacccactccaagtcgttgaacgcttgcaatccactagttcgcaggccgatgcgcggttgattggtagtatcggcaataaccaaggggatcgctgatattatcacttcttccagggtgtatgttgttgatgatacgttcatttaaggcctagagtttcagtattacttatggtgggtcacggagaggtgttgatataggcaatgatgacctcttggggagtccccgtacctatcacgcccagagtaatgcttctcaacacaattgaaatccacgagtggcttttcaccatatgtggatcctataataataccactcgggtgtttgatatgatcgcccatagctagcgggggccgttatatcgaacgggtgattcggtgagctggaacggccacggcagattgaaatggtcgcgcgtggggcttttttgacctgaacaacttctcaatattgaattatccaatagtgtttctcgaggtcaggtcactacgccaaccgcaacttctgcaatgacgattacgtcaaagctatacagctgtcttgtttttctctgggtcttcaccacaacattcgaacgaatatccattccgcgatcgaaagtcacgtggtgattccccttatcagaagctcagcctcaacaaaatacaataatctcagtccaaaatcaaggccgctgattcccggccgattaagaaaaaaaaaacctgcgtacagacaaaccccgtcgaaccccgttcagatcccgttgttgtaaatcccaatcactttcgaagaatgcgtgctgaattgtgtgaattcttttaccataaagattgccaaggctgcctaattaggcttagtcctaaacttacctttataattctcttaattctacgcaacgttattggctgagccatatgttccgcctttttcgtcgggattctgccggtttcaagaaccaagaataagattacataatccaaaaaatgacatgcatgtcaacctaaaatgccaacctcggaataccctcactttagacagcctctagctctctccaacgatcctttgatttcaacggggtttgactgttatcctacaccttaccattcttccccattcccccattcccccgttcccccgttctccatccccccatttccccatttcccccttccccaccggcagtgtcaccggggagatgttagcccgcgtacggagacatcgatgatcacattttaggcccactggcccctcttttcggcctttggtctgcaataggaggtgtttggccttttgtataaaaaaaaaaggtgaaacatatgcaggatgtaaagataaactcataaactatgaggacgcacttgtaccatctcggaagttcggccgggatgaatatgtcaaagatcatcttctcggccttagcccgagagaggacgtcggtgccaagcccgatagatggagctattgcaggagactgaaaaaccagaagaataacgtctccaatacataaccaggtaatactagccatatgacttaaatatggggcaattgacataatttgcatgtacactgccaatcattcgccagtcaaaatgtgaagaaaccggcggtatagctgtctcggcaggcggtagctacgatcaaggggtttccaagtaattaacctacagaaccgtggaaggttggaagctccaacagcagatggaccaatcataaaaggacaatacaaagggtccatatgaaaagtggacttgggtgtgtagtacatgtattgaccccgcaagaaagtcaaaaaccaaggacacacattgtgtcaagtataagttacagcatataaagaccttggagattccctcggcttcctctttcttgcatctatttgtgataccctgtgctaccatgtccctctacactaccattaagactcccaatgtcacttatgaacagccccttggcctgtacgatttcccccctaatatcaatgatcagttcgctaattggttgctgcttctaggttcatcaacaacgagttcgtcaagggtgttgacggcaggactttcgagaccctaaaccccaccaccgaaaagcccatcacctccgtctacgaggcttccgagaaggatgttgacatcgctgtcaaggctgcccgtgaagccttcgagggtccctggaagaaggtgaccccttcggaccgtggtcgtatgctgaccaagctgtccgagcttttcgagcgtgatatggagaccctggcttccattgaggccctcgataacggcaaggccgtcactatggccaaggtcgatattgccaatgcggctggctgcctacgctactacggtggctgggccgacaagatcactggccagaccattgacactaattccgagactctttcctatacccgtcacgagcccgttggtgtctgtggtcagatcatcccctggaacttccctattcttatgtgggcctggaagattggtcccgctatcgctgccggtaacactgtgatcattaagaccgctgagcagacccctctttctggtctatacgcctctaagcttattgttgaggctggcttccccccaggtgttattaacgtcatctccggctttggtcgtgttgctggtgccgctatctcgagccacatggacattgataagatcgcctttactggttccacccttgtcggccgtatgatcctacaggccgccgcgaagtctaacctgaagaaggttactctagagctgggtggcaagtcccccaacatcgtcttcgaggatgccgatattgataacgccatctcatgggctaactttggtatcttcttcaaccacggccagtgctgctgcgccggttctcgcttgttggtccaggagagcattcacgataagtttgtggctcgcttcaaggagcgtgccgcccagaacaagctcggcaaccccttcgagggtgacaccttccagggccctcaggtttcgcagcttcagtttgaccgtatcatggagtacatcaaccacggcaagaaagagggtgccactgtcgcttttggtggtgagcgccacggtactgagggctacttcatccagcccactgtttttaccgacgtcactcccgatatgaagatcgcccaagaggaaatcttcggccctgttatcgccgtcaccaagtttaaggatgaggccgatgccatccgcattggcaacggcaccaactacggtatgtattattcacattcatcgtgaaattatgatttgtcgttctaactgtatctaggtctcgctgccgccgttcacaccaagaacatcaacactgccatccgcgtttctaacgctctcaaggctgggtatgtcatatctcattatttactgctgtaacagagctaactttactgcagtaccgtgtggatcaacaactacaacatgatctcttaccaggctcccttcggtggcttcaaggagtccggcattggccgtgagctcggttcatatgctcttgaaaattacacccaggtcaagactgtgcactaccgcctaggcgatgctctgttctaaaatgaccaagaatataagaaatttcatctgggtgattgaatgcaatgaagtgatgatacgtgattggaaattttcgttttgtatagagtccaaattgaagaacattggttcctcaaccgcttttccgatacctcgtaggacttctatatttgattatgcgctattaagatcctacatagtcccttttgatcgccagaactattacatacaattagtaaaatccaggtgtttcatagtatcgttatcaagctaagtgagcaagcacaccataccagcctaagcaacagcggtttattcctgggtcattctgtgtaagcctccttcctatcaccttcggcccttgctatcgtgttcgatgttcgaggtccttgttgaaatgactgagtgaactgggcatcgggccgaggatccacatgcggaacgaacagtcaaaactccatttcctgccagacagatagatagtcttaagcaatacacaacatgaaatgacagccaagatcattgttcccatactcagtaatctaaacatcaacaaatctaaacatcaacagtccttccgctggttccatgtatgtaagactcttcctcaccatctccagcccttggcatcacgtctgagatcatttgccagatcaggtaggtacctatcgtcattcaaggatatcagagccagagaaaaattcgcgaagttaattcgagtccattttgtgtccgtgtcaacacgctcggctcatttgaatccggagattttcctaaattccattggcttgagattgcaagagattttgtaggacatacaacttgagtgtggccttgttccagatgatctttgacggaaccaaaaatgcggctcatagccgaacttcggaagttccctggatcgagtcagccgtggatacgcgacgatattcaatgtgcttagtgacaaccctgtatgcctcttcaaaattccagcggattttctcccacgtcgcgtagggaagagcccagaactgctagatgtcaagggattcgccttccacctgttcccatacaaggtggatgatataaccacccgggacaatgtcatgttcgtcttgttagccaatgcgatatccaagcagccgaggagtgacagagcattctttctctgtgagaagtttcaaggcttccaattccacatgatcacctggtggaccggcctggggtttccgcacatctgaatcctcaagtcgggtaccatcaagaggaatctgtttgtagatgcgcatgaaggccgtctctttcccgtcgcgacaatgatactttccctcggtgaaagctggacccatgccaacggccgactcctctggtgtgatggggattggaagttcgcttaacttttcaatgacggtccattcccaaaggggataacgagtagcatccgggccgtcctcaaagccgatagtgatctttttaccagacatattgggaagaaaatggatttcagccatggtgagcgtgtacggggaatattatggaagctaataaatgtcaagaaattggatggagatgaagatgggaaaagggaagaggttggtttgatggaggtgaggataaagtcaacgggaaagttggtcccaggtacaaattctagaggattggcgtgacaacattacatcaccacctagctcaatatacaaacatcttgatgaaaacaagccaagctaaaagaaaagcattatgctccaactgcgccgatcgtgattccattcggcagttcaagtccgatgggaagtccacacagaaatttgtcggtataggttgtcccgcgctttgccgcgagtttctcttcgatatccctatacatgtcatagctagttgcttgtcagtatttcctaacgcctgaagtcgatcgaactcacgcattcatttcctctattgtaagaaccttcttcgcgtcttcgactttataggtgggaatatctttgttgacggagaaacctatgcgctagtcagaaaataatgcaccacaacacccgttgaatgaaatccactcaccaatccgctcgttgatattgtaagccgccttggccgctgctgcctgcactcttgtaacccgaggcagacgtacctcctggtaaacagcgagggcttgggtaatatccccagagaaataacgcttaccaaataagattccaagtgctgccgcatcttcaatagccatgcaggctccttggctttgatgaggcatcatcgggtgtgcagcatcccccaagagacaggtgctaccgcgttgaagatacgggtacgggtcatggacccagagacgccatggtttgatctctgtcccaatcttcagatggtcaaacacttgtcggtctaattctgggtatggggcgagaagttcctcaacagggcggtcttcggccccccatgcctgtgttgaatagtcgccttgctcacgtgggaagaagcagtagtacgacagaagctcaccaccgttacagggtgacagaacaatcttatcccattttccttcctgtccaccccagtactccagtgcgctatcttcggcgtagttcaccaggccgagcctgatggcatcctcggttttgacattggtgtgcaagcagctctgatcggaggctcgcttttctggcgtaattccaatgattcctcgaacggccgacccgattccatctgcccccacgattaggtcgtggcttacaacctcaccgttctcgaagacgaccgtactcgtcttcagatcgatatcgctgcactagatcccaggcaatattagcgcatgctcaattacagacagcttccattgataactatacccggtagttcactttgagagttgctggcgctccttcgccctcgcccagtgccgaatcctttagcatggcatgcatatattggcgatgaaacatgttgtagacatatccccagcgcttctcataatcgtcgaggtcgtacacactgacgggctcgcccgtattccagtcgcggttgataagcttcttcaaaaccaccgggtcacccttggcgatatccacgttccactcgtgtagccagcgggttccattggcagcacacgaaaccgaagcgccgacttcacctgcgaagtccgacttttcgtagatggtcacagtgtgtcctgcacgacgtaaggcaactgcaacggacattcccccgatgcccccgccaataacgccgacattgagactcctccagcctggcatggtgaatatagataaatcaataaaacggggtttgaggcgggttgaagtgaagcagaaagatgtgagtgtcaagtaaaatatatagcaaattgtctctcatattaatttcttatctctatatcttctcatatatacttcacaggtcccgaccctacgtcggctggcggatagtgcactcgggtcaccgcgggccgcgcactagcgcttatcttcggctcaattcaacagcgttatccgatcaaaagattcattcacaggaaggctgaaggtaaagtggaaattgaaagagggaaaaacatacaatagtaaggacaccctatacagcgcaactaagatcccaggggtgggaaatccatatcacatttaggtcgtcttacctacttgccaaagctttccattctcagccttgtcactttctcgataggatagatgatttgattctgaaattgtattcacatgctaactagcagagagtctttaattgatcaaaggcgaccggtatgtaatactagttatggctcaattgtacgaaggagttcggttgaaaattctattaattttgttctatcaccggcaagccaggtgatccctagctccgtctctgaatatcatggtacggctagaagtcatgtaatagatagtgataccatatggataccatggtaaattacacagccagaaatatccctcaagtggcgctatacccgaagtagcttttaggtaggtggaaattcggtatccaacgtcgtggagagtgagcaatgagatgatgcaagtgagagatttcagggctttagaaaccagcttttcccagcccgctgtcatgattcataaaaggaattcttgattgtaagtggagataggttgaggttgggttggaatctatggtttcaataaggtttgtgacaatgagctgttgcattcttcacatttcttgtctaatttatgcttctacagtccctcttcaggtcggaatgcctcttcggtccgaaatgaagagaagacccgagaggaatgaagggatcgggaaaccgagaatatcgggatcggatcccaggagaataggaggaatcttggcttcccataccattgatatcttgatgggaacagcatatttgtatgagaatgcgtgggggtcgaatgcagtactaaatcagggctgatattggatcctccatctttgaatctaacacctgaatacactgctagaagtcattgttcaactgaatagacccggcctaatttctgcagtcttctgaatgtggtcggttaaaactaatgataatcaaggcacatgatagccttcaaataagtgtttctataagggcgaaaagactaaccacaaccctaaccttgaaggaattcgcttcatcttactttctatgcatccctcgctttgaaataccagaaatatatcactcatgttgcactgacattcacccccacgccggggtgctccttacgtagtccttaaatgcgcttaaacacgaggataccccacgcggggagatgatcttttctaaatgcaacctcgtcccctgttgtttctccccacaaaaagcttctccccacaaatagccagtaaatgatgatatgatcggggtaagtccggggtctggctttaccccggtcttttgcaggttttctgcggggaaaggtattcgggtgtaccgtcatataacatgggtttgattggaatagcagttatagcccagcaagttttgggcattgcttcttatgccatactgctcccggaccactagatatcaacgccacatatctcacccctgtagaggattccacacaactcgcaactcgtccgacttccgagtctcactttccacgtgtgatttttttcttcttctccctccttataccccttgcctcctctggtatcttcttatcaactttggctcagactttatatgaattagctggtgtagtcttgctgcttatttatccttctctcgtcttcctcatacttcctccttctcatattggaaaagcaaacagaaatgtctcccagaaactcagacatcggggtgggagatattgacaagtctcgcgtcgacaatgtcgaaatagtcgccaatgccgacaggcccaacccacagaaagaagcccccgaatacgttgccaacctgacgcccgaagaacgcatgaaggccgagaaagctctcgttcgcaagattgacctgcgtctactacccatgataatcatcatgtacattctcaactacctcgatcgtaacaacatcgcctccgctcgactagcaggcctcgaggaagacctagggcttgtgggcaaccagttcgcgacctgtgtcagtatattgttcgtcgggtatctgttgatgcagatcccatccaacctgatgctgaacaaattcggcaagccagccctctacctccctgttgctatggttatatggggtatcatttccaccgctacagccgctgctcagagctacaccggtctcgtggtcattcgcttctttctaggtttcgtggaggctgcctacttcccaggctgcttgtacttcctgagtgtttggtacacccgcaaggagttgggcttccgcaccgcagcgctgttctctggatccttgctctcgggtgctttctcgggtctgatcgcagcaggtatcactaaaaacatggacaacgtgctcggactgcgcgcctggcgatggctattcatcatcgaaggtgccgtcactattgcgattgccttcatctcgatcttcgttctccctaactttccccgcacgaccagctggctttcggaggaagagaagcaactcgccgtgtggcgcctggaagaagacatcggcgaagacgactgggtcgacagcgaacagcagaccttcctgcatggagccaagctcgccttcgcagacatcaagacctggatcctgatgctcatgatcctctgtattgtctcctccgcctcagtcaccaacttcttcccaacggtcgtcaaaacactcgaatacggcaacatcgagactctactcctgacagcaccgccctactgcctggccgtcatctgcgcatttaccaacgcatggcacgcagaccgtagcggagagcggtacttccacgtcaccggaccgctatacatttccgtcgtggcattcatcattgctgccaccaccacagctaccgcaccccgctatgtggcaatgatgctcatggtgccgtctttctactccggttacgttgtcgctcttggctggatctcaaataccctgcctcgaccggctgcgaaacgtgccgctgctctggctgctattaactgtgtcagcaatggcagcagtatctatgccagctatatgtatcctgattctcaggctccgagattcggtccgtattcctctaccgctggctttgtttctagcagtcctaactaatcatcctatagtgcctgccatgtctgttgactgcgccacggctttcatcgccattatctctgcaacggtgctccggtttatgctcgtacgtctcaataagaagctcgatcgcggtgaggaggttgagggggctgtccctggtgaaggaagccgtcgtggtttccgctttttggtttaaatctggttatagtgttatttttatttctgatgcctatgtggctatagtatacgtgctacactgggatctgcaatagatatatattgagaatatcatttgacgaccgtgtaagaggtcatgattatatatgtactatgctccgcataacacgtagaactagatgctaagtggattccttccctttccaggctaattcgtcaaagctgggtggcaaaatccgggaagataccatttaacgcgctcaacaaattggtgaatcctaaagccaataggactaaagtcctagtgatcactatgcactgcgataccaaggtctaaccgggtgttttcctccatgcacgttacgggcttgcttcggaggtggaggacaagaatacataccttgtggtcatgcctgggagttgttataaaaataccatcttctcattacacaataaacgcgtgataaagatatacataataatatgctcacgaatcgaaaaaggccgagaatacaaagatgctgtaaaaacaagcaaatccacagcctcaagtcatcctggtctgtctatgcaattcggatagccgagtgtccggggagaccgtttcccgtttccccggatattccccattatccgaatacaccgggccgatgatgagtgccgggaagtcctgaaccgcgactgaaaacaccaaaacaaagctgtcggatatcatgtccgagaatcaaatcattttaaaaaccccaaactccaaatctatgcggtataggaagatgccaccaattccaaggtagcatttaagcattgttatccaataccccgaatgggttctcgccctttgtgttcgggctagaggaagactcctcggccctttgcttcttagcccccttcttcgcgggaaccttagcgaacccctgttcagactcggaccggctaaccggggccgaggcagcatttgccttggaagcagcagccgagcgggtgcggactggcgagtcgggggtggtaaccttgccggcgatcttctgggcctgagctttgatgacctcatcgtcagtggtagcttcgctgttctcgccctcgatggcagccttgcgaatttcacggctcagactcttcagagcatccatgccggccttctcagcggcctccatgtgcgtgggctgcttcactcctacatccttgcgattcaggtaggagcggacgaagaagcgcgcaaagaggtaggtgaggggaagaaggtaggaaacgttcaaccagatggcgaatgcctgtccggtggtgtccgcacaggtcatcatctgctgggagtagccggattgctggacaggcgcggcggtgaaagaagtgcccacgttctcggcaagtccttctgcgcccgcagcccggaatgccagcttcttcaaccaggagaccgcaccaacatcggtggtggcagaggcagcggcggaagcggcatcggtcaggtgttgtaaggcggcgctaccggacgggtaggggatagtgtagtggacaaataggtaggcggcggccatgttagttccgaagacgaactgggtgatttgcatggtggtcaagctgcgcttgatggcgttagggacgcgaatgcggagggccgtgagggtatagtaggtgtactgaagtaaaaaaaagggttagtaagtttgcttaacaaaagcaatgcgattgtccgacttaccatcatagcatgaatagccgagttaaccaagcagaagatccaaatgggagctgccatgtagcggataccagcccacatgcacatcatagctcccgcgtggtggtaggtctgtagggtggagctcttcttgcccttggccagaatgatcgcggtgtcgacaacctcgtagaacttggacagatagaagaaccagccgaagtaagccaagccctggttccatagacggccagcatccgtggggtctggcatgccgttggtgaggtggaaggcggggttgggaatcgaccactcgtcagtaatggggctgtatgtagcagcattgccgtaaccgcggggcccattgatcttgcatagtgaatccacaagtccgaccagtccgtaggggtcgtcggtatccgggaaagagctcctgaatgccaggaacatgcctacgaaggtccatgcggaatacacagctaggaagacattgtgaagaacgacgaagagcttgaacaaacgagtgttgctgaacgcgtatggcttatatccgcgacttttgttgatacggttgagcaggaccacagtgatcgcatagacactggcgattgtgattggtagtcggacgtccagcacctggttatagagatcgttcgggatgttgaagggctgcttccatgtcggggtgtcaacgtgaggtgcggggacggtcactggaagctcatggggagggaaggcgaggagagaggcgggagggaaggcaatgcgaacaatcgcctggccaaactcggtgggcacatggaagtcgtgcatgattatcgccaacgcggaagcgttcaattcaacgcgtcaactagggagaaagaatataggagaaaagatatgattctaaagaagaaaaagaaagaaaagagaaaacggttgaagtgttggaagcccagtggatcctccagataaactgcccttgaaatttctcaacaagggcaatggccgacgatctcgatccgcccgcgtttagtttgttgggaattccaaggcttggctccaaacgtgccgaggttggtaatcgccacttgcctagaagagtaacacctgtgacctgtcgtactccatttatgtacgtgcacccgtggacatacggaatatgcaatagtggacttttctcaattgtatacttcgtgcagagtaactatggtgtatatatggccagaattgagcttccgttggggcattgacctataaattgcactgccaacaactaggatgattggataattctccgatgtctttagaagatcagaccgggaagtccggacatgtcgggactccggcccggtgatctgatgccatccgcatgcctccaaagcctgtactttgcagatgccccctacctcaatagggctgggtggggaaaagccgctgagtcagctggacaaagttccgagttccccggaacattctcaaccaaggtttggccggcaaaggttaaattgacaaaaaggcttggagggccggaactgtcaaggaaggaaccctggaaggtgacctcggattatccaatcgggatcagctgcttgttgggatactccagggttgaaccactggaatcggcccaaaaatgttggggatctgaaatcaggtatataacaaccctaatccgatcacatgcagcctcggtcttactggatgttgaatatgaatgacccaagcacgaagatatgagactcaccaggatagacagggactatgatgtacaactattgtacaccgtacaggacaaatatatcgtcatcatgacaaattgttcgatttccatcctaaaaaaaaaacacccatcgacgccaggaatgcacaacgtaacaaatacagggttaaaagtacagtctttagcggggcttggtgtcatggggaataggaggaggccccccgagtggtgttggtgacgaaccgtcaacaggagacgcacgaaattcagcccgcttaggtggaggcggtggaggagccttcttgcgttgagcgggttctgtggatgagaccgctgaagaattagagtgggccatggggatgggacgagcaggtgggcgtggaatccgtttgttggcttcggcggagaatttacgatcctccacaaatgtgttgaaacgtgatgtgactccaccccatttctctttacccaactcgatcttgtcggcatggcgttcacggaaatcttgcacggaggatgtgccccgtgcgggctccgccggttccaggttcatactagaagtattcgacgcgggccgggccggtgggctaggcgctgctggggaagagccagtgagccgtgacgcgtaaccactcaacttctgctttcctgaatcgatggtatctgcgtgacgctcacggaaatcgccgtatttctgctttcccgaatcgatggtatctgcgtggcgctcacggaaatcaccgtacttctgtttccccgagtcgatggtatctgcgtggcgctcgcggaagttatggagagaagatgtgctacttgcagggtgcgactgagcaggcggggtgggcgccgatggagatctcgtgttcatctgggaaaagcgtgactgcagctcattgacaggtgtatgtgcaggcgacggagatttctcctggccgattccaaatccaggaaccgagacgcccgcgtttgctaggcgggacgtagcatcttgattgatataatcgtgggagagtaccgggccaggggaataagcggggagcgattcggagctggaggatgcattgcgggcgggaagtcgtggcgggggctttggtggcctttgctttgagattgagctcgaggcggaacttgcagagtccagtcgccgcactggtggtggggggagattgtctgtagaaaggccacttgtgtcggcgcgatacgggattggtgggggcggcctttggtactgttcctcctctacttcggctacttctcggcgatggggatcctgggcggttgtctgatttggcgcagcggcggctccatggtaattgatatgtttcggagggggcccaaataaagatgggtcttttagggccgacaagggttgtgagacatgctcggagcggtttgagctggtttcattgccctttcccataaacgatgcctaaaagcaagcaatggttaataccaatgggccgcgtcgtgaatacacgaagggttagcttaccacgtggcccctgatacccccctgtgacgaggagccgtgtccggagctggaggagtcaccttcctttccctttcccatccaaccggcctagtagcaaatacaagtcagcatcaatggccgaggtgcgagtgagcccgagaagggtgaggggtgaggggtgagcttaccactgagcctctgatacccccttgtggctcaggggtacgtccagagccagagccagagccagaggattcaccttccttgccctttcccatccacccagcctaatagcaagttcaagttatcatcaatggccgctagagttacaagtcccagagggacaacgaggggtgagcttaccacttggttaatgcctttgaaatcacctcgccaactctccttcccaccttccttgccttctgggtgccagccacccttgatagtattgcgtaaaccactcattctgctgcagacggaagtgcggggatgacaagttgctagttaagtggtaagggaagctgtgacggcaatatccccacttaatcacgtgcgagcttgatatagtaattgatctacagtgtacatgtgcgtagactagttataggacataagtgaataatttatgatcgcaaattctaagacaattcaactgaattcctaatgttccttcacgtgcttcaaaatatttgattgccaacagagtaagcggtctgaccagattctgcgatcacttccagaataagtaggcggtacatctctgccccaaacaggggttataatgaactttaagcatgtcttttcgcctgcatatggtcaaatgaaaatatgcagagaagattagcatggcccctgtactaaggatgacacgctcaatcaaagagaagctacctaatttaattttttttcatttacctgtccttcgttatggagataggatgcgggtctgcggacttacaaagtccatggatctgattggtcctactgcatttggaaatcatgtgatactacaaagacctcgagacgcgcgtctggcggttccagttatttgtgggaggcggtcaatagcagaatatatgttctgccggatagttgagggcggtgggatgataataggaagaaatgcgttagtgacctcttcggcgctgaagaattggcttgataggaaaaaataatctattaagtatatctaggtatggatttgcatagttgaatgactagccgggtcaggattgcttaacaaaattcttcagtcaagactttcttggagatatcgtcgactgagatcgttctcaatccattgctcaattagcccaacggtatctccaacgaggtgatcgtagtttgcaccacgtggaataaacatagactgatgtgccatgacttcgtccatgtcttccattaatatcggcacccaatgggagttatcgttgtacttccaatgatgtgacggtaagagtatgaacttgcggaggtgttgtttattagggtctgtggactccgttgttgtgatagagccattttcagttgagagagaaatgctttctgagagagactggctctctatctggtcggttgaggttgaggcagacgctgcggtacttgtgtgatccgccagcggagtactgttgttatcgtcggccttctcgatcgccagggaagaatgagaagtggtggacttcaagtgcttggtgtcgattgccatgttgctcatggcggtagttacatcggtttgttcggagccacttggcgtatctgagtgttcgtgcgaatgtattttcgttgcagattcatccatggcaatttcaccctcccttgcggactccttgtcttcctttttagactttttggctttcttttcggcttttggcttgggtggtcgtggcttgcgcccagtgctcgcggtatagtaattgacaaatcgtactctccaaggactggactcagcttctagctccatcaagtgcccgtatcgccgacgaagttcagagtaattattgacacaaccagcgaatttgaagggtgatacgactcgatcaaagatagatcgtgagagatgatcggtgtttttgttgacaaaatgcaaaacaccactgagaaagccacggtcgaccagacgcacatcattcttgaatggtgggtcaaagttggggctgaaatgggcggatttgaaggccggttccaagcccagagactcttgttctcgcgcaagcttctcttcatctgccgcatctttctggggtattaagctcatggttcctgttgctattacacgaggatggatccccaaaaagggaacatcaaatcctactaagcctaaaattcgatgctttgggtgcccatcttgctgtaagaggacaacgtctgcagctaggattccaccgagactatgtcccagcaagatgacatcaaggtcatctgcctcatgtggcgatagcctacaagtgcctccattagctgtgtacccagttaagaatcaagtaagaacgggctttctgtgtcggcacataccaggcactaaactgatccacggctgtttgtatctcgccttgagatttgtatctcggatacatgcgggtaaacaccacgtgtgactcatccaacgaggctgttaacaaatcatgaacatgtagcggcaggtcatgaaagctcgcttctgatcccatgaagccatggatataaatcagtaatagtctgcgcttttctgtggcctgatatcctccggggtgagggagcgacaggctggaatgagacccatcggagccagtacgaatattccccttcatctccatcgccaaagagagaagctgagataggaaaaagaacaacagaattcccttcttggatatccccaacgttccaaatgcggggacttcttggaacctgaagttgccactgctgactaagccaagcggttggcccggagctccaggagatcatatccacattgaatacttcgtatttagagagggagaagatagtgtttgaaggtgtgaaggtctttacagtattctagtaatctttgcacataatttttatactgctctgtgtccaatctctgctatcttccgcgacttccgcgactggcagaagaactatacaatcactcattacatcgtaatagttatctcatacctgtgttgttgagcaacagaaaggatgtggatcaagacattatagtttcatgcgtcctatgataatatctcatttaggctagtagaattcgcagatttcgaattatcacctcattgatctaattttagtattgtggtcccaaccctgatatctacgaattatatacggagtacggagcagatctagatgatttcctttccctgccagaagggtataaataggatggacattgggattgtgatagtacatattatattcaatacaacaataattccctgacactgatctcgattttctgatcgatcctgctctcactctcccctcacttcgaagtcacttctctctctttttttttcttctcgattttatcctgtagcctccttcgtttcagtaaaggtgtcacgatccacatggatcgctattacatgcttcatgtttgcttgctcgcttacggagtactgtttgcctatttgcttgattgctccaccagatcattctagcacctagctggaaagatagaatatatcaagcattttttcgtctgatattcttgttctgttggcatatggctgccaagctggttcgtgcctgggctcttaggtaaagtactttacgaaaagcctctcgagatgactatttcaagtatctatattcatgattactgattgacaatacctttgttacgatcgtaacgtttgcttgtttgtttctttacttgtttgcattgtttacaaagtggtcagctatctcccacattgcaacttgcttcttctttctcagttattctgaattaaatgcactcttctttgcaagacctggcttgtcacacccccttccccccgcctgaccgcccgacccccctcatccagccctggagcgctcggaggggattgatgaagcagagacacgcctcgcacgtgtcctgtaggcttatctccgcgtcggggggctatcaaactgtcaagtacagccagaccggtgaagtccgtcacagtagatcatctagcaggttgcaagtgcgaggggtgtcgagacgacagatttgcccgagcggattcaacagagcgagggggtaaatgagtgcgaataattcgaagccggatagttgagttatagcccacgcatttgtatcattttatgtacattatggcactgaaagcagaaatggaggctgtactctcatcttactccttgttaagatggacacttactattggctcattgaactactgtcagcattggcgtcaaagcataatgatccaataataaagtgccccataaaacgttagacaacttacgaactccctagttagggttgatcctacgtggccccatattagcgcaaactgtcgtaaaaatagactgagcatctctaagcctcatggaaaatgaggtttcgatgatttgtacatctcgataattatttaaattattatgtgacgtttaatttgaggacatgttggttcaaagggatcagagtaatatgagatttcattgacaagtctaatgcatgtcgaagcgcttctttgttagagtctctcccgagggcagtgcttccacccccacctggtctgctgtgcatgatctatgaatatcacttctactcttcctaagacttttttggcatctcgcatttcttgctaccttccgacttctttcgaatctgggcatattatattattctatacaaagatatccgggaggtaggtaaaacggtacctaaaacggttattgaatgggagaattctagcgccagtgtcttttgtactatcttttgtggtagttctttgtcttcgctttggggccttcacataagacaaaagtgccccgaagaatccaacctcaacccaccatacctgctatggcaagattcttgagattcttgccatttgcaatgttgggcactggactggacgatgcagatacctcggattcctatagatcggaatatgccccctcatcggtggcatcagcgggccaggatgttgtattcacgacagcacccggctcaaaaaacaagaattttgcagacgcgtcaagctgggcagatccagcagtgacaggtatctttcctggaacagtttcatggccctcagtcaccgagttgaccacatacccagcatcaagtgagacatcgactgtcaatgatatcagttcagaagccagtccgaccagcgtactggatgcaacatcatatacttcatcaccatcaccatcaacatcgaccacaccgtcaagtacattcccatcctctctcacatccaccacaacaacaaccacaatctcagcctcagccacagccacagcctcagaaacaaccgcagtaaacagcgactcaaccactttttccggtggcccatcaaaaacaacgaaaatcgccatagcagtcccagtctcagtaatcggcctagctctaatcctagcgctgctattcttcctctcccggcgacggcgccgggaaaaggaacgcaacgccttgccaccaccctacgacatagcagcaggccatcgaagtgcagtatccacacaagagctaatgatatcaccgaaatcctcgacaccagaagcaagacgttcactctcgaacccagctatgtcctcagcggccacgtcaatgcctctgcctcttccccggatcccgattatcagcatttcgccctcgacggaaagtcggggccggacgcccagtctcggtcccagtcctgactcaagctccgtgcgccgcatgccgacggcccatggacctggtgattctgaggcggagcttggggttgcggtggctgtttcgatggcgcagaggcgaagtgctacggagcaggaccttagagctcgggttgcgcctgttgtatcgtcgagggggccgtcgcggttggctaggatgccgtttgaggacttttcggatgatgaggttggtattggcattggtattggcggttcggatgatgatgacgatggagctgtttctgatgtgtcggatttggatgggcggaggagggagagggactttgatgaagtttctgtggtctcgtcttttgatgaggtgtcgccgataggtgagcaggagaggcggtttcggggaacttgaaggtgccggtaagatgatatgatataacgaagctaagcttggtctagagcttcttttacgtgggtctcttttggtccttggagtttgtgagtccgaagttttcattgtaaggtacaagttgtgtatttcagactacgtatttgaataggactggaatggtatcctaaccatcctaaccatcgtagttgtcatggtattgggcatttcgaggccatgtgcagtgtggaaatgaactgttggtgtctattcttattccgattatcttgcaccaccgaattcagccttgtgggctgtggcctttccgtgcgtcaattcccgaagagccatggtggcgtactggcttgatcccaactggaatttcaacacaacggccaacttatcagctgcagtctcatcggccatagcggtatcggtattctcatttgcaggttgcagattttgcaaatccgtcttgacaaactgctcatcgtccttggaataaagtttaatatcgaaagagtagttggctcccaacatgcggctgaaaatcttgcggtagccgccgctaaggctgatatccttccacttgcggcgcatattggacggatcaaggccaccaccctgctcgctttccatgaagcgacggtagaattccttcatttcgttttcggggtagataatgtcatatccaggctggggaagcaccaggtcaaagatggtatatttgccactggctgcctcttcggccgacagggcacgggctcgcatgaacatgtcctcggccgcaacggcactgttctcgccctgaggaacaacgataatttcaccgtcagcatcgacagtctcggcagcctcgacagcagaggcagactctttgtcgcggtgctcttggataatgaccagatcgccttccaccacccggtccccgtaaaggcgccatcgctcacttgcagcgaagttccagacaagcgactggtatgcgtgtacatacatcaatcgcaaggtccgggggatactctgcaacgcacccaaataatccttgctgctccttccgaggtggcggatgagactgttttcagcggagaacttgcgcggcatctttagcagagcgtcggcgacgctaccgccggtctggaagatattaatggccatggcacgatctttgtcatcattgctgatgttagcagtagacatatttccctccattgccgcctgaagagatgcaggggcatactgcagaatagcatcgcatgcgcccttgaaatctccctggagcattttgacaccgactgtatccgttcgggttgcgaaggttccaaatcgctggagaccgtagtagttgaagtatcctcgctggtagagattcttcaaagaagtaccgacgacctcggatgccttggcgatcgcagcctgaggatcgctcatgctcacgccgggaatttcaacgtcgcgcagagtaatcacgaactcatttccctgcaaatctccaaggtccaggccatgcttgcggtactgaaagtctccaatacgagcattgcgaagttccgagttcacttctacaagccgggcgaggcgaacgcgcacagcacaggcacgctgcacggtcacaccccgcctatccttggttccagcaaattggagagccttagcattcatcctcaatgagcgagcgatgtaattgatgacttccattgtgtccttgttctccttgtagatcgtgaaatgcagatatggcccgccgagttcttcccagtttgtccgctggccctggacccgggcgttggcgcgtcctgcggtcgcaccgcgttggaaacggttatttgccgcagtgattgacatatttccatctgcatcggtagtagattctagctgggaattgaaaatgcgacggatggcctggtggatcttggtgcgaaggtcccggtcagacacggcaaaggtgacactgccgaattcactaggtcgaccttttggcttagccatggcgaatttatggagcgcaattatttcggcagcattttgagcgccaaagtattcctccagaagagtgtggtcctcctccgagactttgatctgagctggtgtttccgcttccttggctggggtttgttctgcagcctgggcttgcacctctgggactgtcgacgcaggcgtacgctctgtaacagtatttacagagttgtcgggctcggtgatcgtatggatgcttcgaaggtggacaacttcgccggtggtcatgatctcattgaccataaaatctgtgtatctgcgcatgattattagcgcaattctcaagtggagtaaataatagctcacctcttcttcaggatacccgagaatccctcagtgttgctcacaaactccgtgataccgacctcgacttccttcagagcctgcgcatctgagactgcggtgcttggagtgtcagttgcgccattgacagcgatggcgacctcagttgaccctacatcctcagtcttctgtcgcttgcgcggggattccacaatatctggcttctccatattgtgttaatcgttcgtaatgagtggggttagatggagaaggttgagcttcaggaactttttctttaccgatttggattagcgtggaagggccaagtgtgggtcagccctacttaccgcattgggatgggaacttcatacttcacttctacatttacctcattgaacgtttgactctttcaataatcatagattcattcagagctgcctcaccatgtaatttctactagctctatactgtattcgatcataaccatagttgtcataatacagactaagatactcccgataccttcaatgcctcaaatggaattaatgtgttacaacagtggtgtaacaatttatcatcaatacacagaaaggactttaagtgccaaatctagaagcttttgaaggctagagcccattgtcgcgagctattataaaatgatcgcacatggacactcccgatgcaactactatccccaactagaccattgcgacgacaatcattacgcacaggtatattgcctcaatttcagtctgagaccatcgttatgaggtttatagtggatgagaaatttggtaagctacccacaatgatgattcgagtctgtgaaaacgttataatagaggctaattgtttcatagactccggtatgtgatcgtaggtataatgtgagagttaattcgatattctatagattctcaataatggtcatgcgtaagccaaaatgctgcataagcttacatcagatcgaatcgaggtttttcaaagtagccagacgaatttgaaagcatatatgatttcttatggaggtctaggcggtctatacttagaaagtcgaatagataccagagcgcaagacagaagtaaacatgccccagttaaagagccgaagcgtatattgtattcgaaggtatgttgcgactcctaatactctactcgcttcactcaaatataagacatccaatcccaatcacaaagaagccggtaaaggcaatacgcgccagaaccaggaaagcacgaattctaaataagacgcccggacagctgcgcatgcaacaaaccgaagaaatcactcaatctccgaccacagctgagaaggttggctgatcggacttgtgctctggaaggaaaccgaaccagaacatcgaggtataaaatgaaggtattcgcccgctgttctcgatatcaattctacaagaatcaaccttctatccaaaatcattcagtgagcctcattactatctcgcgttcataacaaaccgcaattgagcggatcattgactgtcatcgcatattagctcaatctaaaacaatgaagtctaacttccttatcgcgctcttcagcttggctctagccgctgttgctgcccctaccggtatgtcatcagctatgcggcgttgtgtttagtcgatcacttctgattgagtggccatgataggtcctggcggtagcggacttggcggcggcggtggttccggcggctctgtgggcggaggtggcggtggcggcggttcaatcggtggaggcctcggtggtggctttggaggtggcttcggcgctggttctggagccggtggtggtcttggtgccggtgccggagatgggatctaaaaaccttttgaggctggactaatgcgcttggcattgtgtagtcttgaggtggtctcctaataggatgataggactggcaataacagcttcagccctacttgatttgcatgtctgaatgtgtagtggtctctagagtacagttggctgtgaagtagaagtctgtatggtaaaagaaaacagaggaccaaacataataaaactgctaacgctcagcccaaactccattgtggttctttttctatcttccaggatgtggtgtgtgcatgatacatgggttgcgttagaataaaatgctctgtacgagacaagtgtgaaaaaaagggggaacaaatgttcaatgcataacaaaaacggacaagggaatggttattttacagctcatctttgggatcctccttagtcttgggctgatccttgcccttgcccttgctcttctcggcatcgggcttcttcttttctttagatcccttcttaccactgctgctgctcttcttcggctgaccggcgtttgcagtcattctttcgtacatgcggttaaggatgcgctcaaactcgcgcagccgcgagtcaacctccaaaacggtcaaagctgggtcatcagactcggaaagttcctcttgcagactgagctgggtttcgagccagggctgggtggactcgtaggcctgggtgatggccgtgaggtcagcgggagtgaagagggagtacttggggcctgtgggtttggccgtagcggcactcttagtagatgtggtagaagaagaaccggagtatgggtcttcatcgagatcatcgagatcaccgagagggtcatcagaagcggctggggctgggggcgatgagctggtctcggtggaggtggaggaggcgcttgaggctgagagggaagaggagtagagctgctcgtcgttgtcgatctggttcttgatcaattccttcatggactcggcattcttgagcatgtccttgagcaactgcacgcgggctgggcgagaagagctctccttcatccgcttcagtgcagggttgacgatggccttaaggtccttgagcctcgactggaaatctgcagtcttggcgttgtcgctctcatcggacagccagtcgctggccttggagactctctcggagagtacaactagttgatctggcttgactgcattgatgaactcctcgttctcggcgagatctcggctgcggtagatgaaagattccagttcattaagagcctcttcgcgcaggatgcgatcacggtccgaatcatcgaaggcaaggaggcggcccttgatgcgactgagctctgcggctgatggagccggagtgccaagcgtcacagacttcaagctgatcgggataacttcaatgtttacctgaggggtagcctttgcgtctttctttgcgtccttggtggatgtggtggtggtcttggaactggcggaggatgcaggggatgattccgtctcgggctcaagggtgatcgattcacgcggctctccatcttcgccgaggggctcctgctcatccttctttccaaggccgaagaagcccttgacgtcttcgacaattcccttcttctcagattccacctcgcagctaacggtaccagccataacttcgggaagaccgtccacagggctgagacggatcgtaaacttcgtggtaatgtttgcggtggtgcagccaaagttatccttgagcctggcaaccgacgcagtaaggttctgtgtctggacactgaggatgggctgttcttcatcctgggaaacatgctgagcgaagctgaattcgaaatcctccaggttcttcacggtgacttgcttctcaggaccgacctgggaagtggctgtaaacagcttctggtttctttgcttgccatctgagttccacttcaaggagatggggtacgtagcggcgtcaccggtgcgaatgtccttaacacggaaattggggctcaaagctgctcccttgaaggcggcaccaaagacagccgcttcatccgcgttgacgttagttctgattttcttagaagagccagcgaggctttccaattgcttctggacgaacggagtccgaatggctccaccgtgcaacacgacagattcgatatcactcaagtcaaggccggccgctgccaaagccttctccactggggttccaatgcgggcaacatactcagcagccatcttctcaaagttggcacgggtcagcttgtacttgaagttgatgttctcgtcgtacagtccctcgaagcttgtcgaagtctcagtgttggcgctcagaacctgtcgaagcttctcagaatccttccagagtctggacatagtctttccatgcgccttaatttcagctggtgtaaccttatccttgagtttcgtatcctcaaccaagtgggcgaccatgtcgttcacaataaggtcgttcagggagtcgcctccaagtgacttgtcccaaccagctccaacaacatgaacttcctggatagtcttgttgaatttgccaacatccttaaccttacggctctggaaccgcaaaacactggcagtcgtagacccagcacccatgtcatacacgatgtggtattcgggcttctcgccatcagaaacgctggggaaagtacggctggtggcgtagttcaaaccgacagccaatccatcactgataagagcctggattttgaaacctgccagctcagccgccaactcgaggctgcgcttctcctccgcggtgtagaacacagggtaggtaatgactacatcccgaacatcagatccctttccggccaacgtatcagcattggccttgatctgcttcaactgcattgccagaatctcctcgaccaagaaggcgtctttcttctgtgcctctcctagccggttgctgcggagagcaacagaaccgcgaccatcgggggcggcctccaatttcaacgcggggaacctgctcctataattcttgactgcctcctcatcgccatcgttgaatggaacgcccaacagagtcttcaggttgatataaatgtcgtccgggtaccgagctgccaaggcgagcgcatcaccaccatagaaccgttcggggaaaggtgcatcgctctctcttgtaggcttgaaagcaacagcagcggactccttgcgcttcgaatctttagtgaggacaatctcaagcggaatgccgggtttcacaagagtagccttgaaatattccgtgccgatgtcgatgcccaggacggccgatccggcggcagaagctgacccagcgaagctaaggaggaatacgagaaatggaaggaccacgagggatagcattggcgagctggataattgtcggcgatttaagaacgccattatctatgtgtaggctccgggctgccggagtcagccaaatcgtcgattgaaggggtttcttgcggttttaacagggaaaacatacccttttccgaacgtatatagacaaattgacagatattcaatcactctgcctgtttgccgaatcgtgtgtcgcggtttgggctagctttgcgccagatggatgatcggagggagctatgggatagctcagagattggtgttgggttggcgggtgggtggtgggggcggtgcttagaaaaggaaaaccaggatgactcgaaattaggccatctgagaccaaagggatactgtggccacttggcagtaacgtaacttgaagcctaaaagagctattggatgaggacacgggtcattatgcaaacacatcgggcgacgtttgatgtttgcactgcttatcgttatcgcattatgtcatagccctaattccaaatagggctgaattgtagaccagacaacttgtggatgttaatttataaccatgatgaaatgtgggtgtacaattaatgcaaataaacttcaatttgcaaactaatatatataactataattagggtcccataatcgtggataaggagcgtcaggtcgtcaggagacccattaataaccgccatcctggcgtctttcaagtgaatatgtcagaaacaaatttcttggatgttttcgttgtctttttttcttgcgtgggattatcgtccgatttctcgctagcccctgcccaaagcgatggcatcatatctcatctgacagatcaacttccgtgtagatcaattagagcagagcaaacaggagagccaggccaggaatcatggccacagcagacttctggagagctggagcactattgaacacaggcgaggaggaagcagggggagccgaggtggaagaagtgatggaactcgactgtgccggggcagtagacccagtagctgaaacaccggttggggtagctggaacactggactcggtagccggaatactggtctcggtggccgggacagaggtctcagtagccgggacagtagtctcagtagctggaacactagactcggtagccgggacagaggtcgcagtagccgggacagtagtctcagtagctggaacactagactcggtagccgggacagaggtcgcagtagccgggacagtagtctcagtagctggaacactagactcggtagccgggacagaggtcgcagtagccgggacagtagtctcagtagctggaacactagactcggtagccgggacagaggtcgcagtagccgggacagtagtctcagtagctggaacactagactcggtagccgggacagaggtcgcagtagccgggacagtagtctcagtagctggaacactagactcggtagccgggacagaggtcgcagtagccgggacagtagtctcagtagctggaacactagactcggtagccgggacagaggtcgcagtagccgggacagtagtctcagtagctggaacactagactcggtagccgggacagaggtcgcagtagccgggacagtagtctcagtagctggaacactagactcggtagccgggacagaggtcgcagtagccgggacagtagtctcagtagctggaacactagactcggtagccgggacagaggtcgcagtagccgggacagtagtctcagtagctggaacactagactcggtagccgggacagaggtcgcagtagccgggacagtagtctcagtagctggaacactagactcggtagccgggacagaggtcgcagtagccgggacagtagtctcagtagctggaacactagactcggtagccgggacagaggtcgcagtagccgggacagtagtctcagtagctggaacactagactcggtagccgggacagaggtcgcagtagccgggacagtagtctcagtagctggaacactagactcggtagccgggacagaggtcgcagtagccgggacagttgatttcattagcaattgaaatttgtagaatagtcggagcttcattcacctgggcaagtggtagtcgtgtaggtagtagtcacgataaccggggtaccaggggtctcggtctcagagggagcggtcacagagggagtggtcgaaacaggaagaggtgtggtgggaggagtggttgaagcgggagcggttgtaggctgagtgcaacccttagtacaggtgacaacagacgtcagggtgatcgtgttagtcgcagtcacggggtgggtgtatgttgatgtgccacttgtgatagtactccatgtcactgatttcattagcaattgtaggatatcatggaacactagactcggtagccgggacagaggtctcagtagccgggacagtagtctcagtagctggaacactagactcggtagccgggacagaggtctcagtagccgggacagtagtctcagtagctggaacactagactcggtagccgggacagaggtctcagtagccgggacagtagtctcagtagctggaacactagactcggtagccgggacagaggtctcagtagccgggacagtagtctcagtagctggaacactagactcggtagccgggacagtagtcgcagtagccggaacactgctctcggtagccggaggaatcaccacgataggagttgtagaagcatcagtgcaagtggaaacagacgtcacggtgatcgtgttagtcgcagtcacggggtgggtgtatgttgatgtgccacttgtgatagtactccatgtcactgatttcattagcaattgtaggatatcannnnnnnngcaggcgtcacggtaatcgtgctcgtctgagtcacaggatgggtgtatgtcgacgtgccgcttgtgatagtactccatgtcactggttttattagcaattagaattgatagaataatcggaatgtcatttacctgggcaggtagtggtcgtgtaggtagtagtcacaataaccggagggggagtgccagtctcggtcacagagggagcagtctcagagggagcagttgtgggctgagtgcaacccttagtacaggtgacaacagacgtgacggtgatcgtgttagtcgctgtcacaggatggctgtacgttgacgtgccgcttgtaacggtactccaggtcactgattttattagcaattggaattgatagaacagtgggaacttcatttacctggacaggtggttgttgtgtaggtagtggtcacaataaccggagggggagtagtctcagagggagttgtaggagcgggagtagttgtaggctgagcgcaaccccctttagtgcaggtataaacagatgtcacagtgatcgtgctagtcgcagtcacgggatggctgtacgttgacgtgccgcttgtaacggtactccatgaatttattagcaattgtaggatatcacagtcggaatcttatttacctgggcaagtggtagtcgtgtaggtagtagtcacgataaccggaggaccaggggtttcggtctcagagggagcagtctcagagggaatgctagaagcaggagcggttgtaggctgagtgcaacccttggtacaggtgatagcagacgtcacggtaatcgtgctcgtctgagtcacaggatgggtgtatgtcgacgtgccgcttgtgatagtactccatgtcactggttttattagcaattagaattgatagaataatcggaatgtcatttacctgggcaggtagtggtcgtgtaggtagtagtcacaataaccggagggggagtgccagtctcggtcacagagggagcagtctcagagggagcagttgtgggctgagtgcaacccttagtacaggtgacaacagacgtgacggtgatcgtgttagtcgctgtcacaggatggctgtacgttgacgtgccgcttgtaacggtactccaggtcactgattttattagcaattggaattgatagaacagtgggaacttcatttacctggacaggtggttgttgtgtaggtagtggtcacgacaactggaggaggagtaccagtctgataagaagtcgaggtaggagtcacggctggagtagtaggaaccaccactggaatagtagtcggaaccactggggaagtaggaatcacgactgaagtagttgtcggaatgactggggaactagtgggcgtctcggtctcggacgaggtagtctcggacgaggtggtctccacgggcggaggagtctcgacaggcgcaggagtagtggtctctactggaggaacactgctactgtgaccaccctgacctccgtggttaccccaccaagggccaccgccatggttaccactgccgccgcggacggcaatgcgaggctcaccaacatgtttgggagtaatgactacgccggacgccaaggtcgcggcgtagagcagaacgatcggaacgcctctcatcttgactggcaaacgaatgcttatgtgctgagatagatagggctgatatgctccttggaacgaaggacgacaggaaccgtagcgagagagttcctaaacaagcaatataaacaattgaaataattgaggacgaaggctgggagagattgagaacatggcaggcttatatgtagctcgggggtttggtttcctcggggccttaattcctgtccggttggctcactcgatagcttctgttcggttggccatgggctagtgtggaccacctggtaccccattgtattgggtgctcaaaacaggaagtcgaaaaaataaaagtggcgctcatattcgaaagccaaccagaacgggcatgaacaaccagtattcagcagtcgacccgcatattttccatatttccaacgaagaagatgtatgtaccggaacaggcccggttgactagacgaccaggtacaagggttaagccaatgagaacctgtcggggtctcagcgattggcgtgtagtttgccaaactcgaaaaagttgaaatatgacaaagtcaaagtgttcagagcccgatgagcggatcagccaatggactcggatgatgtaggttgtgtcttggcaatgcgggagatagctctgggatgtcccatcacggcatagagtacgtacctatatttggttagggtttgccagtttctgctgttcttgtcttttttttttgtctaatttccttgtcttgatacttcatgatatcaagtctagtagtagaatgtcttttatacacatcatgaaaccgagctatgaataactcttaagtttggcccaccccatatggcccagataaaagtgtggggaagcgaaacctcacgaataatagtgaaaattcaaactgggcatctatgtactttgtatagataaaacaagttctcacgaatcttagggctgtggggatcaaaatcggacagccggaaatgaatatcagtctagatttgggtcagggtctattattctagcccaggcggtgatcgcaaaatggtttgatcggtgtttattctgcgatagacatgcccctgacccaagtatctcgtaataggctgtcaaaagcccagcgcaggccaagtggaccgttgtgggacaggccctggcattttctccaacaaaacatgggaagttctgcggtggggacttttatggagacttggtgatgtcaacgtgttgtccttgtttttcctctttggctttcttttgtattctttttgttttctggtgaggaattaatttactggtattgatatgtgacgtatacatgtacatagtatgtaggactgccctattcttacagtatcataaggattctctacaatcccggtccagactattggatttttgaatttcaaattggactgatgacgccctcgatctttctttgccaaaagaagaattatggcgcgatatacggagaactttggagaatatactctgcccctgttactgtgcaatatactccggacactgcataggcactgcatattacttgcatagttacacgtagtcacacaacaaggggcgttagttgttcgagtccttccaaggtaactatattgtatgtacggagtacatacaatatagttacaattctttttgataaagaacgacagactcgaccacggttcggcaatgtgacgtggggctattaccaaggaacatatgtatatctctgagtacggcgtatccataatggaatatatgtcttaaactctccaccacaatctcggaaaagtatctcccaacaagtccccggccttctcaattgcggagagtgagattattatgaagaggctggtcgcattcccttgcaaccatgcatagtggcgcacatgtcatcggaacagataacgagggctacatggaaaatgtggggtgatacactgaaaaagtacaaagtgagcctgaagccaccaaatccttctatgtctttttttctgtggaacaaccttggaattacaaagtggtatcgtacactccgtactccgtaactatattggatctgcgtaacgggaggtaattatcgcccgaaaccggatacataccctgtcattctttcctttttttttgattgcgatgatatcaacatatggtgtagctcttatctagtcgtcatcatcgtccgagccactactccaccccgtctcgtagtactctcgaatctcgcctagtccatttaccaaagcctcacgctcatcgaccgagactagacgtgcggcacttgccgagatagtcttgatgctctgagctgtccgggtcgaggcggtcaatgcggtaaacacatttactccagtacctgtctcgggggtggggaacatgtcatgcgggaaactgtcaagaataggcatgcggagtggcgtgtggaacctattaatggtatagaatgtgagtcgcctggctgagacatggaaagttagtgcgtagaacaggaaacctacttttgcaacatcgactctgagttgtatctcctgatcttgcgacggtgcccaatgtccctgtcctcggtggactcgctgtccctttgcggttcgtctccgcgggtgacttggacttggttgaagacatgggcgccttttttgtactccccgtcataggcgaagtcaatgtcaaattcaatttcggcttgcgtcggcccgtcttcattggaggcttccttggtttgaccgtcattgattttcattttattaatggaggattgtaattcgaagatggtgtgcgtgccatcttccccagcgagagaggcctcgaaatgctgatatggccgcaatcgggaaggcagcgtgaccgtctcaatcgctgagactatcagggctgttttctgccattctgattggcgatcaacatggatatagccgggcagcttatgcggaacgtcgataattggagaatagagcgatgccagttgcgagatcgaatgaagtgacctggccttgttcgtatccttcttgaactggtggtgctttataaagttcgaaacttagccaaccggactcgcgattcttcaaaatagcactgtatgactcacccgctgtgtcttggtgccgtcctcaatagcccacacccaaatacttttctttccaaattcatctctcagtcgttccatatactgggctgcgaatccgccccaagcatcatcagatccggagaacagttgcagcgcccgcaagtgatcacattcttcaagcagaggtctcaggtcacggtccagcaggtcatgctccttatcaaggtctttgaatagttcttccccgacattccaatcctcaaagggcatgttctgggagtttaggtcatattcgtttagctggacaatagaccttggatgatagaacactcggttgtagtctgaccagtagcgtacggattccgaggtcaggcgagggggttgagtgcccagatccaagcttttctgatattcacttggttgaattggaggttgcttttggactatctcttgtccatccctgccagacgttagtttgaaaaacttgttcatcaatttaacttgcataccataatccttgacctgctgtggagtcttcacttagctcgtaaagtgcattgtaccggcgcaatgttccaaatccgcccttcagatcatagattactgtgcgtggggtgtaggtttcggagccatctactccaacacccggtcggaaatgaacatcgtgatcaacatctgactgttctccatcataggtaaagtatgattcctagatatatatcagactgaagttcatatgtgatcgtggttgacagtacctgcaggttccaaaaatgtgttgctagataattagcccgctgaccaagctgaagtgtaacgatttcatgcatattgatggacacaattgacacttgcagtgtagcccctcggtgaattttgatatcgacaatgcccgccaaagacgcacagacataaccaaaacatgacgctaggccggatgtggggagtaccgcacgtgagtgactaaccacatccgggaaggtgctgaaaagtcaccagggcaacagtcacatgatccttccaaagagggaaataaacatgtttctgtgtgcgtcaccactttaactccacaacggtgattttccctcgtgaatctcgttatttctgtgatgattctttgaccctgtgatcatcctcggctggatccactacttgtcaagcatctgcgatggagtccccaacacgtcccatcctgagcccctcgaaggcgttgaatccggtctcaccggaacgcatgaatcaacaaaccatccccccctctccctcactaccctctgatctcctcacattacaccacaagaggactagaggtgtttcggaagtccaagccaaagtggcatttctcaacggcctttctcgaggagggaacactgccaactctgcatcgaacaatgccgctctacaacgcgctatgctgggccgcgaggaagccgagtccgccctaaccaccgcacaagaagatttatccgaagcacaaacacgagaacgccggatcagtgaacgcctggaatcattgttggaagagctacatggtacgaaagaacgccaggcccacgaacgatcaattttcgaaaaagaaatcagaaaagcccgcaaagaagcctttcgggctggttcaaccttggtaaaacttcaagaagaattgaaacactcgaaatcagacatcagagccctgaaggaggagctgggagcagaacgcgaggcaaaggacaaggccaagcaggaggcattcgaacgcgcctatgctcttgctggtcttacagaggaactcgaagtcctgaaagagaaattccgtgccctcgaaacagacaaccactcgagcaccctggaagtccgcgcgcatgagattcggagagaaaacttcggaagactgtcaatagcagaaggcgatctcgcgtttttggccaccccgcgcagagcgaaacgagccgctacaggatctgtcctatccccagctccggcacgcgaagaagaccacgcagaagccactccccccaaacgcccacgtttgtcggattgtgcaccaaaagcggagagtgaaaaagttacatccgagaaggctgctgaactagacgaggatatgttggaggagattagggaagagctaatcttcgagcgtcgtcgcagagtcgcagcggaagatatggtgcatttcttgaacattgagtgccagttcgaacgctgctcttgcaggcttgcagagagccaaggtcgtcgctacatttacgatgctgagtactataacaaattccaaaagcctcagatcgaggcggaagcaaaagctcgtgctgaacaagccagcattcagaaagctagtgtgcaccaagtccttcctcatccagcaagcactcccgaggctagccctccccctcctccacctcccgttcaccgatcacctgttcaccaggccaccactcaggtgagatctcctcaacatagcgttcaccaggaagaaacagagtcaagtcgtactccttcagccgcgccacctgttcctgtgcaccagcacaccgcgcctaccatgaaggctgaacctacggatctccccaagatgcagatgccagaggagcccctggttacattttctccagtgactggcacattcacggcattcccatctcctctccgagataatgtcagacctctgcgattggacttcttcgacaaacccgatcgagccgagcctcggccagatgtccacgcaggtcatgccgatgcctctgcatcacccgacttaggaatcgactcgttcaccccctctggggagcctgccccgaccagaatgccccgtcccaccccatcagatggtgccgccgaatgcccgcgtgtaccactgtctgtggaagcaagaccgtcgagacgtgtcgagagagagccctatggctaccgccagcccattaaccccccgaagagagctccttcccgacaagagccacagtcacagcgcacttcgcaccctggcgttcccgatacgcctatcgaccgcgaacaagcactcgcacagatcagggcgcgccgaggccgcacccatagcaagcagcgatcagtcagtgccagtgagcccggcctcgcagctcgcgcctcggcgggatccaacccgacttctgctcggggacctagacgtgttcctaaccccagtcttcgggctgattcgaggaccgagaaagaacttggcgaacgccgagatatgagtgctcctgttcggatgttccgacgttaatgaatgccatgggacgtatgtctcatgatgcatatttatgtctttcttttgcatagtctgccggtgcttgtcctttcctctaatacccccggcgctgcatcgatttgtgtttatttcatttgcgtgacgatcgaaagcaatatgctctgttttgtttgtgtttggatcttttagctccgatgtcatgagcctcagtatactatggatttaatttcccaactgcatgtccttcttttgatccactggcttcaagtgtccgtccctcttttcacatttcctatgtctcatttttcttcttttttacatagatttcgcttgggagtgaacttcatcttatcatggtcagtctggaatcaaatgaaccattaatcatccaccgatatatccatgaaaagatgtaactatattggcctacagtacataatctatgcctaacaacaaacaaatacctccatggagatctcaaagatctcaaagatagaacagtcgcggagagaaccagcctctacaaaaccgagatcccacaacatctaatcctcgcactatcaaccttcgcgccacgaccccaccacaaggaaaccaattcctcaacaaagactcggtccgtcacactccacacatcaagccccatctccgccatatccgccaccgtgatggtgacagtttcatgcgcaccggaatcccggtgaccagctctcgacccatgactcgcagacccgcccgcgctcgaccgctgccggagtaaaggggaattcccctcgtcgccatggatagactgccgagacatggagagcgaagcatcgataatatcatcatcatcgtcgatatacggcgcatcattataggcgtcaccgtcgaagtcgctatcatagcgcgcgatggcgccagccaacgtaacgaagatctgcgacgtcaggcggcggaagtacgcgaccagcgcaacttcgagcggctcctggccttcctggaggggattgcggggtgcgtcggagtgagagggtgggttgtagggtgggcgggcgatattctcgatgcttgccagaaggcgggagtcttgttctgcctgctgttcttcttcttcctctgagaggccctcgcggttctcgccggcggaggcccaccagatgaaggaggtgtaggcaaggcgggtccaggagactggctcgacgatcgggctgaaggagtaggctgagtctgtgtctgaggggtcttgttctggggatgtggggtggtcgttggagaattggcggagtccgcggcggagcattgagtagcggcgggcgtcgcgctgggttgcctttagctggatttgttggatttggttgggtttgccgcctgtgtgatggactagggagattttggggaaggctcgctcggcggtttgttgtgaatatggcgtggggagggtgatgaggacgtcgaagagatcgggtttcatggataagacagtatctgtggaacaggcgatccagcttgggtctgtttcaaggtctattatgctgcgcgacggatcgaaggaggagaggtaggggatatcatggatgccgacgttgaagaggggacgggggcgtagtggtggtatgcgatcgtcggggagtagctgtaggagggagttcggcaatgaggctaagagagatagatcatatactggatctgaattagcagcagctcaataacaatgcgcattggagcataccgtagttgcaagatctgtgtacaggagcctcgcccatgaagaggatccgcttgcgcagcaaagctgctctatagagggggaagatcaaaggtccgaagcactccgtgaactctggaagcgatgaagcggggtggaagggtgtcaaggccggcctgaacgtttctagtggcattgcatcgctgaaggcgcggttgcgactcgagtgatctagtcggtcgccgggtcggaaacgaaaactaagaggcgagtcgaggggggagtcaggaattgaagaatcggtccctcctattctatacgtctcccaataatcagacagaaactgcgtatccgacatgttctcggcgtatttcctatcgaagaccattgtcagtcgggatctcccatcctgagtgcctggatatacgaacaacgccagttccttgagtcttggagcgtgtcgccaactcttcccaagtcttccggtgctgagaggcaccagaactccgatcgcaaacatcttcgcattgcgctcggcctccgtggcggggtgattgaggaacgcgctgataccggcatactgttcatgaacgaagtatctgaaggagcgcgtcagcaaagatcaaatccaaagctttcaaagacgttcaaaaacatacaccaggtcctcagtcacattgtgtaaccctgagggcagtgatttgtattcaacaaccccttccacctcaactgttcactcgggagtcagtatcgcgcatcagagcaactgcagccgcggctagataattggttgctcacctcccggcacagttcgcttccacgagaccacatatctgttgtcgcataatgtcagcgatagttcctgagcttgagagctgcgatgcccaggggaaggtgtagaaattacccggccctgatgtcgaagctgatgacgaacaaggcggcaatggctggtggcgactccatagaggaacgtgagacgtcaatgcccaaaggcccaggagattcagataccattctcaaggataatcatgggatgcgacgccattcaagcagtgtcggggaatcacggtaagttgaggggtgagcctggcaaaggggaccttggctattcgaagttagcgcctcaggcagcatctcgggatctagaagtcattgacttcggataaaccgaccattcacggtcttatgtggaaatgtaacccacagctgtgtcgtaagctgtggtctcggcgtcgttcggggatcgtctgtataggttgttgtggaattctaactccggttcttcttactcagatatatcccccgctcagctatctagaggaccaacgccaacatctaccaggcatcatatcaaagaaggcaactttttggattgcaaggaaaatgcgtttctttcattttctcctattatgagagatgcccagaggggcgggctattgattatactactccaatctcgagaaatgtgtctaccataccatatagatggcctccctatcccccacggggccccaccattacgcgttatcttcacggagacgcgccagtttctcctggtcaaagataccaggacccgtgagttcgttcttcaacgttgagatagaaggcacgaagaagtattctcctcctctttggataacccagctctctagcggcatgcgggcctcggtgggatatttgccatcaggaagaccgatagagcgaggcgggtgatggtctagtctctggcctacaaacgcatcaatgcccggaccatcaccaccgacgaagtgagtcttgcggtcagggaagtggtgattgcttgcccagcctaggagaatcaattgttagtggggggctctttgtcacacatgcatgagttcaagtttcgactgcttacgggtagtcaggaagttgaatccattgcggatatcgctctggtagcagacgaacagaagcccacgttccttttcctcagaggactttcggtcagtcatttcttcagccgagacttcctcgccatacggaatgccacgacggataataacagcatggtcgtgctccaagtcagcccgtggtctcattttgcgggtgtgtgccgcaaaggggcactttttgtgctcctcaacggggtggtaatcgaagttgtttgatgagaagagtttctcgtcagagtcatcatgaggagactcatccacgggggttccttgatattggtcagcaaatcgttgcgcgaacttcaaagattctaatttgcgacgaaccgttcttccatcttcccatcaagtatgcagcaagcttttcggctggcttggggtggtcttgagtaaaaggggcgtgcatagcgttttcctccatgaacctatagacttgatcaataccaaatagcaaacaatacaataagaagaggtcacccactcgtcaaattcaggaacaagttgttgaaggtcgcggaaaacaaggaaactgccatctttggcccatgctggttggcccatagggtcgccctcatgtccgcaaacaatcaatctgcatttcatcagtctgagagtccttcattcaacaacggcgagcacatttaccctgactttgtggccttgggctcctttcccacgggttgcctttcatcccagccctcaattacaggctgactgattccatccttgaatccgaaactgaatataaaggtaagtttggccggcaaagactcctgaggttgataagtacttactgctcttttcccttcatagcgcctgggcgaacctttccttctctgaccagtgtgaactctatagaagggttctggctgagtacatatgtatctgggttgagaggtactccctcctcggccaggaaatgttgcttcacctcgctgaccgtggtatccaaatcacgcttcaggcttgcggtcaccataatcacaccatcaatgagtctctcattatcatcggtgggcttgtattcctttcgaagctcctgggggttatcccacccctcgccgacaagatccgcatacatgcccttttcgaacaatccaccacggagttgttgcttccggaagactgttgatagttgcctgtcttttttgacgaaagtctgatcattggaattcacaaatgctccaagctatgagtggtggcttatcagtatttgttcaatctcagtgacaacagttggattgataacttactgcttcaagaccggtcgaggtaaaggcaatgttgattcccggtaaaccttgaagcttagctgatttttttgccagttcggcctccttctttgcccgcttgatggtctcacccatctcacaggcatcttgcccggtggtaatcttgggaataaatgtcttcagtcggttcttgaaatcaacttggtttcgaacgcgaaaaaagagaaagctttgaaacctttttgggagacccggcctgatgaaggtaagtattttgaaagaccatgccgatatgaatactcggtagcatggaaaactcaccaaacatctccttggatatttgccttgatggctgatgtgagactcatgatggaaggtcggactcctcaagagtatacgatctgatgtcaatgaagactacgaacgaacaagggttgacttgaggggacaggatttatatgagaaagacggtgggtacgccatcttctgacgcagcaagaattctatttttctaacaaaaaagcaaaggaaggaggcgggtctgtgattgaaccgtagcattcagttactggatcagatcgtccattagataggcatattcgacaccggtgttattaccgagggagttctaatagtagtgatcgatcatagccacattcagctatacgagcatctccgggggagaggggaagggcatacgcctagagatgcgaactcactgccccacaggtcattgctcgaatgtatgtattcctaattcacagatgattatagggtttcgtttcctcgatgctagagatcaacatggcccacttcccagttacatttgagtgtgggtccctccaagcaaatgagatggcatattttagaatatcacgaacatcacggttcctgggggcttgtgcggagtactccgtgctccatacatataacacattgactgcagtagtggagattgcagaatatccatatccggcaatgtaggatgtacatcgttcagatctctaggcttcagccgtgatccacctagctgaattcgaataccgttcatgtcgaccgaaaattttagtcaatcaaaagatatgctacaagtcatgactgtcgatttttcgggtatgaatgtaacatgataactatgtagggcgctgctgacccaacagcttgaaaatggaaaatcatgaagttaaaggaatgtggggatagctttcagctttccacttgacaaattgtggactcatattgtaatagctcgaggaacgacatatgcagcttacatctgcaagaagctagtgcataggccggtgtaatacccagagagactcagctgaactaaacttccacctttgatgtcacgagaagtcctcgggagctgattcgctgaagattagtctcagcggaagcgggccgggctccaccggaattgccgctagcacgaactttctccggagacaacattgacgttcctctctcatgatcgacatgcagtaaaattacactcgatcagagccaattggtcaatcagagccatgacgacaagttctgggtgcaaccttggaagctccacctataatatgcaagctaggaataacctcacacctgggaacagctgaacttgtacctatccagttcggggtgggcttgcatgccgtgtcttctgcaggatgcgccgatctttgactctgcccgagcatcgccgatcgggtctaatttttggggattttcttcaccgatctaagaaggagtgcccactcacgccgtactacgcaaggtggacctagacaatcattgacgtctatctctcatgctgatcttcagcaatgccgagatagacacttgactggtggcaagcagccccacatttcctctatgagatcgggcttattgtcatagtttgcgtaatattggcataggtcactccgtgctgaaaatcacttagatcctgaatgacagcatggatccagccctggcggagtattccgagtactgcacttatatgtacccttgatcacgtcaagatttctttttgcacagatgaagtgagccttactttcctcttctccttgacattctcttcacactccgataaatttcgcccaatatgaaacttcagtgggccgggctcctcttcggggcttccattgggggagtcaatggcatggccgaatacatgcacgaagctatgagaggagagcgtgtctctggctatggaaaacccgacaacccctcctgggtaccgcagttcaaagatgaatctcctccgtatcaaggccaccgaatctcccgtcaagactggaccgtgatatgtagcagctctgctagcggctacccatgcaaacatgcgatcgatggcaagaacggtacctcctggcacagtgacccctccgaaaagggacatactttcgttgttgatctcggtgcatggtaccaagtgggcgccgtcgttgtccttcctccaattgatacggacacggaaggcctcattacccagcacaagatatgggtcagcgaagatcacgagagctggacggggcctgttgcgtatggaatgtggcccaacacaaacagacagcgaatgtctgcgtttgaaccatcatctacccgatacttgagaatcacgaccgatgccgacaaggaaaacccctgggtcggtatcgctgaactgaacatctatggaactctgtacaccattcctcgtgaccctgcgctgggtgtctggggaccaactcttgatttccctattgtgcctgtcgccggtgctcaggagggatctggcatgcttgccctttggtcgtcatgggccgatgaccagttccactctacgccgggaggtaaaactgttatgactcggtggaacccgttgaccggcgaggtctctaagcgcactgtcagcaacacccaccacgatatgttctgccccggcatttcttatgacggcactggcatgatggtcgtgactggtggcaacgatgcctccgagactagtctctatgattctgccaaagatgaatgggtccgcgcaaccgaaatgaaactccgtcgtggataccaggcgtctacaaccctctccgatgggcgtgtcttcgtcattggcggttcgtgggctggaggttccaacgttgacaaggatggcgaagtttacgaccctgctacccgaaactggactatgctccctgaagccaaagtcagcaagatgttgactggggatatggaaggtccatggcgagcggacaaccatggctggctcttcggctggaagaatctgagtatcttccaagccgggcctagcaaacagatgaattggtactccgctcacgataatggtagtgtgaaggcggcaggggatcgtatggatgatgatgattctatgtccggtaacgcaatcatgttcgatgccgtgaagggaaagattctcactctcggtggctctccggactatgataaatcgtggtccaccaacgccgcccacattatcacgatcggtgaaccgggtgaggagccaaaggttgaaccagctggaaacggcactatgcactacgagcgtgtgttccacactacggtcgttctccccgatggaaaagtcgccatctttggcggtcagcagtacggcgttgcatttaatgaggaacgtgtccaatttattccggaaatctatgaccctgaaaccaacactttcacaaagttacagcagaacaatgttgtgagagtgtatcataccgtgtcaatcctccttccagatgctcgagtgttgaatgcaggtggtgggctctgtggcaattgctcagccaaccactatgatggtcagatctttactcctccctacctcctttctccttcaggtcagccccggccgcgtcctgagatcctctcgggcctgccagatcataccttggtgggcagtaccttgcgtttcaaaacctccggtcgtatctccacagcttccctgatccgtctgggaaccgccacccatactgtcaacactgatcaacgccgcattccacttgatgttactgctacatcatttttcaggaatacctggaaaactaccctgccagaagattcgggtattttaattcctggatactggatgttgtttgttctggaccggcatggtgtgcctagcatcggcaagatcatgatgattggcttggatgacacgaagaccatccagcctgcgcaggatccgctaagcgtgatggaggaacagaacagtaagcatcaatcactccgaactttttgaaatcttggagactaacactgattttacagacattgggacattcatgaggatcgagttgctgagaagaaagtggttttgaggcaagctggcatttttgaagagtccgaaggttgacatagcgtcagcattagttgcagtaattatagtgcatagcagcttcgtatacctataagagttgaatttgaaaagtcaccttgaatactactgctttacatagagaggaagtagtaggatgccagtctaccaatatattgatattgcccttcgtaccgctgcgctgtcctcgactgtcgcatacagataaggatactagtccatagacatctaccaaacgtggcgaaggaattagaacacgtaaatgctatgtagggaacctctattataatcctaaccaataatattcatactccttgtaagaagcgcgattgccatagagtatagctcaaaaagtccaagggtatccaccttacatatgaaaatcgtctcaagttgagtttatactaattatgtcgggataatggagctatcctttccccttgtaacgatatatagcatcaaaatgggtatatcaaagatgctgcctggtcttgactggatcagaagggatactatcaccatccccaggccttcgatcctcataagatatcgtcacctcgttgacttgatagataccagtcgaatgaggacgtggatgaggcagaatatgtctcgtgtctgtgtcttctccgtgctcttcattcctcccactgctcccagactcatcgtcaagatctttgccatgcacggtagtcgttgtcactgtatccatagcaaaggtcggttgttttacgctgcgtccggcgctgctttttccgtagggaggaaggtcggtgtagtttgaggcgtcgttggatgagatgtcgccgcaaatggagcgccagagagggcgaagggctggaatgctgacacaaaggatggtggtggaaagttcagacatggtccatatcaccgagtcggttgtcgcatctattctgtgattagcttgttttcgccgctaacagacaatggattccgaaactcacagagatagtcggatgattgtgttagagcgttgagacctgttgttcggattataccgcaaattccggcgctgtgaatatgtgttagtatgataaaatggaaaggcaatggatcagtagccgaagaactaacaaaatacccagactcaacgagaaacaaatcgtgtatttctcctttttcttcatgttcaaattccacaaggccaaccatgggaagagagcgagaacaaagtcaaggacggcggaccatgctagaaatatgttagaacaactcaagtgtaggttatgcttggaaagagaagaaagcataccgcacatgattgtggccatgaccgcgagattcaaagaacagcctttactcggaattcgcgggtcccagatcgactccactggtgtacattgtgcgaacacagtaacagccaggataatgctaagaaccatgatactgacgatccaaaaccagaggaagagtttgtgcctaggattaatcagtcaaggtcctcgaacttccagtttaaggaacgtaccattttttgacgacaatccgcatgaggaacgcagcgacagcgcacttgctcaaacccatgctaattgctataatactttgcccagccaagagcagtaacattccgtgggtagtctgatcgacagaaagttcgcctgaatgcacacccatgccataatgcgccgctgctgtacagagggctgtaaaggcaaccatcaaaatctacaagccgacatgacaagttagcaaatcagtgcaagagctatggatgtctcagaagagctcatacccaagaagcgagaagcagtagatcatcccaaccagtattgcggcggatcacagtccgtgtgtagactcgcagtgcaagcacaagcatacacaaagtagtttcaaaccaaagtactccaaccaacgttggacccttaccacggagagcaggcatgttggatgtggagtcaagattcaggaagcagacacaatgacatccatcattactctgttaaatataatcgagccaccagagggaaatagtaaccagaataataggggcccggctaatgatctctaattatgatctattgtgattgcgatgatcgtaatccacttccagctaggcctaacggctgaccatacttcgtacctttgaagctttaaaggtctgaaactaaaaagaaaagaattaaaaattcgtcacggacaataacaaggaaatcgtttccagtggtatggtacgatggattagttaagataaccatactggcgggaatagctcgctcgattttattcttcagcttgaatagatgattcttttcagctctgggtgtctctatttctgcctttttgccctgtagttctatgcaattcgacgtcttcattcctacacatctctctcaacgtttatcctcgtcacattttggattgctgcaatgcaataaaaacatttcaaattctttttgaatatcgttccggagcccatccgcactagtgacagggggcgagttgaacgatatatcacacaatacctttgtggatgtcaagtggatatgtacgataatttgtagggttgcaattggttcggccctagcggaaaagaagcatcgtgcttctcctagtctggtggtggtcatagcccatccacgaggcgacctttcccgcgttttaggtgtatgtgcaagccagatcatgcactgaaatagagtgggtcagggcatcgcattcgcatacaagtcttcttatcgggaagattccgagtgatttgcggtttgattaacagttgacagctgggtgccgtgggtaactttcttgacatctacctagtaaggaaaggaacgctgttgccatatgaataacggcatgtcaaacgaaaatttaaattaaagtggagggtcaattaacgaatcatctataactcagccgtcttcgtaagttgtaggtggttccagttgacggggtcttatgcgggtatccactatacctccgtgaagtctcagatttggggaggtcagttggagtactccgtttgtttaacggagtactccatacatatcatatacaatcgaattagcgtattcatttgatatacaacataagttgaagaccctcctttgctgctcgtgacctgcctgagattgtaggtgtaccttcctaattgggttccgcttcttggcaactgctcgggcctaccgctttccccaccgccttatactgtacggagtaataggtcggacaacaggtgcccgcactttatatgtaagccgctagcgaaaatatctactccggagttagttctcccttaagtgctccaccaactattccttcagaacaggaatcgccacgagtagacgaggattacgacacaacaagctttagaagttagtatgagccatttttatactcaaaattcaggcttaaagcttaatcagagtggcagaatacatgggcaaagggaaggagagttataatttggaaggcacccccgaggtccgtatctcgtattgtaatttatttcaatgggcgtaataaacacattttattagttttaacaataaaagtcaatcacttccgccggctctgattggtccaaaaatcattatgaatcctggctgagcgtccacgtctgggtcggtacggggtggatcggcagggccatgccgccttgggcaagccgcgacccgtccgaaaggttgagctccacttcttcgtataggtctcagaatatcccgtaaaagaaaaaagtacgtgatagcgggattggctgagattagagaagacgtggcaaatgatgatatcgaattaaatttgtatagctatatcagcaatagaaagttgaactatgcgaacggaaagcaatataatccacgtatatacacctcaattgatgcatcagtcctggatgtgaccattttctgcttagactgtgccgttcgagctagtgtcctcaacatcaagtgcatcctgaagctccatctcgacgtggtcgccgaacttagcattgatctcctcgagactcagtcccatggtctgcaggggaaaaaaggttagattggagtataacggtgcagggacggaaatcataacatacctcggggaaataaaacatgatggcaatagtgcttgcgacggtaacagcaacaaacaccatatagaacttccatccgatattgttgagagccagtgtgacaggcgcgctgtatgcgacagcattaccgaagaaactgaccaatgcaatggttgctccctcgctgcgcaggtgggtcggccaaatttcggaaccatagacgtatgcggtacattcaatggtggaggtgaagaaggcaccgaagatgaaataaatagcgacggcgccgttgattccaggtgtgtaggttgtgtggaggtagtacttctcgagagcggccatgacactgataatagcggcagagccaaatccaccgatgactgtgaatgtggttagtataagcagctcaacggcaaaggaatccaaaactcacccaacaacttgactcgtccaatcttgtctaggaggaagatattgattccgcaaccaatcaccgcacacacagtccaaacaattccaagtccaagttgcatggtggtaccaaagcccagtgcacccatgagggtaggaatcaaattggcgatggcagtgatgccggttccctggcccatggtccacaacaggatggcgcagagagcgcgcttgcggtgagacgctgtgcggataatgtagagatatccgcttggagtattcttctctgcaacgacctgggccttgatctggaccgcctcagcatgagcaaaagtacctctagggtcccgcttggtacgatgcagatactccaagaccttcttagcctcttcatcacgtccctgttgcatgagccagcgaggagattcagggatgaagcaaagtgtcgccatgtagataacacccacagcagtcagaacgatgaagataaaccgccactgcatctgagtgttgacgaagctgaaggccagcgcgcaaatagcggccaggatatacgccgtcactgttcccacaccgtgcagaccgaccagcattccacgtgtgtgcgggggcgagatctcactcatgtacacgggcgtattcgagaataccatacccgcaccgacgccgcagatgacacgcacgacgataaacatggtggcactgaccgaaccggcctgcaaagcacccgtgataatgacgatcagggcggcaacggcgttggcaattcggcggccgaacttgttagacacgggtgcctgcagaatagcaccgactagggcgcctccgaggaaactagcaagatatttttagctaaagatgcgtttgcctgcagtgaaggttgaacataccctccaagcataccatcttgtacagatgttgcattagaccccgacaagaacttggcgatgaaggttggttgggcgagggatccagcaagagcgttggccgcgaagccgtataggaatcctcctaaacatgcagtgcaagcaacctattgagtcagacaaggattaaagtaactaaggagagctagtcaagtaccaagatattgacgagactggtctcgtgtctatttccatccttgacactttgcgtgcgtgcgacaggtgcactcttctcagggtcatgagttgaactttgagtatcgctcattttgactgttggagtgagactggcaacaggaaaggacgatgcaaaaagagaagccgacaaagtgaactaagagagggactcaagagactttcagtaccccgggaactccccctattcaagtcttagcaagtgttattgtggctggcacactccattcgcaagtgttttgcttaatcttcggcatatgtacttgaggaaaagcgggtcctggccgacttgttccggaacttggctggacctagccctaggtactttggatagaagggataccagtggctggtatagacggtaattattgccagggttaagacgatccttccacgtgggtttcactacatagcattgcgtacaacatacgattatcaaagttgcttgcgtcccaccatcacgaggaatgtactccgcacggagtacaccgtacatagcctgagtttgagggcggagttaattgttactatccaccgtgagatcggcatctagatctgctaagataggaacagggcggcagaagaaaatgcgtttgctgcgtatgtggattaaatgccgtactccgtgcatgaatcgtacttagtggtttttaattgcattggtcttaaagaagagtcatgtaggacgatcagcgtcagctatggcttgacggtctcgaactaacccgcgctaacttgacattggcgtttttagcaaagtcggggcgttcggaaagtgggggggggcattccatggtctggctttttggcttatttttgcttttttcgttttcatgtcgaaacgattacagggatgtctgattcgccagtggatagagttcatggaatgtacccactcaacgttgttagcacattaacggtcctcccaaggaggggcagatgttagtctgtgcagacgggccgaatggtcccagatcaggggcacaatgccgagcaacaaatgcaatagattatcaaacataaaatccgacctggccacactaaaccgaaacaaagccattgttttgccccctattcttcacatacccatatcctattgtcaagccgatcatctgcacaatggatgtcccggaagcgcctatctttcccctccttgaaggcaaggttgccatcatcacaggaggcgcccaaggcatgggcaaggctaccgcgtctgtgttcctccgggcaggggccaaggtagtcattgccgatctgaaggaagagcaaggagctcaggttgcagaagagctttcctctctgggagaagtccgttttgtgaagaccgacatctccaagtcagaggatgtacaaaacctcattaaggagaccgtcagcgcattcggcaaattggacgtggcgatcaacaacgcagccatgactcccgatcagactcccctgatcggtttcgacgagtcatattggcgcagattggttgatatcaatttgaccggtaccgcgctgtgctgtaaatatcagatgcagcaaatggaaaagcagggcacaaagggctcgattgtcaatattgcttcaatcaatgcctattcaccgcagccaaatatgccagcatacacggcaactaagcatgcactcctgggcttgaccaagcatgcagcgactgaaggtggcccgaagggtatccgagttaacgccattgcgcctggagcgatcttcgtatgttttccccacctttaatccagggaggttctaacaatagcagagtgatatgtcggccgcagcgttggagattatgggcaccacccatgatgagtttgcgcccaaggttagcagcttgaacagattcggacaggcccatgaggtagcgcaggggtcgctttggcttgcatctgactgttcgtcgtacgtaaacggaatttgtattcccattgatggaggattcctggccaaatggtagttggtttttcatgcgctatgttgtacatattatcttgtgtgtggatgaacctgcagctcttcgcctaagggtggggtcaaccccctgtgacgctaattatattctcctcttatttcaacgtgaactctcttggtcaaaatgatcccggaagtcttagacaagatggaaacgcacgagagatggttaggtcgatacgggagcttagttcaaggcaatgacaaacattccatctacttttgttagtccagttacatggttgatagtggataacgctattggtctcccatcttgcggtcttgcattaggcaacgagacgactcgaactactctccgaaatgctagagatgaagacatttcgttcatgcgaaacacgttcagttagatggaacaaatcacacgtgttcttttgcttgaacaaggtcgaggctcatttggaccgtatgtttccttgttcaaccgattgcaacaacgtaagatgccggactgtttgtctactcggccgtgtctaggccatcacaccacgatcaacattcagagtcctagaggaaagatgtcattcattccagaggaaaaccgagagatgcagtttaccgaggcggtgattgtaaatgcattgagaatgctcaactacaaagaagccatattgaaacctatcaatcgacactgcttgacgaataagccagatactatttggaactgttcatcacgataatttagagacgaaatgacaaagcttctgttgcagcacactgcaactgggcaaatcatttgtaatcgagacatatgttgtaactgttcaagaaaaccaagatttccagatcaagttcataatggccgatagacgcattgcccaatggacgctgtattgaagatatcccgtgccagaactgagtccgcgagttgtgacttgcgactttgaaatctacagtgcatttgagcttttctcaattagataacaggaagatatgctgttgactttacgtttatggtagactgctgtattccaaggttcaccgacctgggaaccttggaaccttccttgtatcggcccacgcggatgcctccctatgttgtacgcaaatttcaactcctggtgttatctctttgatacgagacgttgaaagctaaatttgacccacaactgtcagttgaagttgaagttcaaaattagatactcgataagaagttgatactgtgttagtagattctttctgctgacatctagatatataaatcaattcaaatttaaagtccattgaaaccgtttgaacgaatataataagaaattcaatgccttgctcgcgacagcatattgatgctctagactccagggtttccagccaattgtggatatatcttccttttagtttcaatttcgtggatccgcagctgcgcttcctttttgactagctagttcagcgcacatacaacggcacggtttatgcgctagtatccacatatcaggcgacttttatacataaagtatatactccgtatacctgccgactattggagtcaaatttatgggtgactacaaaatgaggttgtggggcgagggcgataaacgggtcatagaacggtttcatatgtagcaatatatcgtactccgcactccgtactttgttcacatcttcgtattaagtggaaataacctatcatatattgagcttgtggacaagccaatgatatggctgaccagtttcattaatactgagccatttttcataaatagacgtgtccaggttgtcttcatcccgagccaagtccgtgatctttgctcagttatatcaccgtcaacatgggtagtattcaaggcccattccctcgcatatacgagggcaaactcgctctcgtaacaggatccgcacgtagtaagtccgaaagagactcatttggcatccaatactcatcatcttccaggcattggagctgctatagtcgagaacctggccagcaagggctgcaatgtgatcatcaactatgcgaccgagggctccgacgagtccgcagcagtactcgccaccaaactccaaaaggaatactcagtgcgcgctctgcccattcgagcagacattacctcgcgggaggaatgcgcacgaattgtatccagcgcaaaagaacatttcaccaactcggaaacaggatctttccaaatcgacatcatcgttcacaacgccgcggtgttataccttggcccattggaatcggtcaaagaatccgaattccgtcgaatctatgaagtgaatgttcttgggccacttttacttaccggtgcctgcaaggagtatcttcccaccgatcgctcggggcgtattgtgatgctatcgagtattgcatcgaagacggggacggagaacacttcgctttactcgggcaccaagggcgccattgaggccatgacacgtgtgtggtgtcgtgagctggccgagagagccaccgtcaactcaatcaaccctggtccggtcatgacggatatgtatatgtctgcacctgatgaggtcaaggaggggcttgcgcattggaatcctctcacgccgttggtggctgttcgggatactgatagcccggaggtgcaggagttgggtaggaagtttggaggaagagcggcgtatgcggaggagattgctgggttgattgccacgatctgtaatccggagtttgggtggtgtactggaagtgtcatttctgcaaatggagggttgtcctttagtacctaagtatagttaattttgctaatatgaactctgtgactttttaggccttcaagttagaaggtagttggcttattctgtatccaaacactgcagccctggaggtgggcgaatataatgtctcaggcaccaattactgcctgaggtttgaagaaatcggtgcctgaggcaaaaattcacccgaggacggtgctcaaagagaaacacaagatgcaagcatttcaagcttgttctttattcttgctcgatcaatttgacttctgatgatcttctcttctcaatttgagcctttatttgtcggtgaaattaagcttgttattggccaaactcaaatccacctcttcgcaaaaaaaagccaagcaaacattcctcgacgtctcattttccattcgacttttctacactttcctatataagtgtcttcggacatcgggatataacagtctagatcagggtcaacaccccgaggggtactgcaaaaatgcccagtcctccatctcatccatattaccccttggatgccgatgttgtgggttatcagcccaaccagaccccggtgatggagcttctcgtctctgctggtggggcctgtactgtccttcttggtgtgactttcgcattggccagatatgtgaaacccacactgcgcgtggcggatcgaatcgccatcctgtggtttgtgctctgtaaggcgccaagataaatatcagcttggaggttgaacactgacaatggggatctatagctggaactctgcactgcttcttcgagggttattttatgatccatcatgcccacatggcttctgcccaagatctctttgggcaactatggaaagaatacgctctgtcggattcccggtatatgacttcggacacattggtgttatgtatggagaccatgaccgtggtgagtcccacagctatatacaacgccgacgctaggattcaccgctgattcccaccaagctcctgtggggaccactgtgctttgttgttgcatacttgaccgtaatcggccattccctgcgccaccccatccaggtaattgtgtgcatgagccatctgtacggcgacatgctatattatgcgaccagtttgtttgacgagtatgtccacgggcgaccatattcccgaccggagccgtattatttttggctatattacttcctcatgaacttcatctggattgtggtcccagcgtgtatgccctacagtccccgggatgtctgttataggctgacttggttaatagactatctctaccaaagtatctccacaatctcggccgcacttaaacgccagtcggaaaaggacaagactaactaggtaagacttctttcgtcataactggtatagtggcgggtcgtagtggagcattgggctagaattgtgttggcacgaagtactcagagaatttggtgttgagcttgaggagatacaagggttcgaggggggaaattggtcaatgtatagtacctaggatcatatgatagccttatacccatgattaatcgaggctgtctcctatgaatctattcatgtttcgagcttgaacaggtttaatagatatctccaaccacactaagtgccctatgacgctgatgtacaaggggcgccacccgacgcgcaaccggcgttattaaccaatattagctgccctatctccctagaagaaatttctctctaattttgaggtcaggatcatctttaataaagactcagcaggtcaaatcacgagggaaacctccctttaatgagaagttgttcgcgccgatctggtttcccggcaaccgatttagtgcgggagggggaggcttatcgaacttgtcagccccaacctccaaagggtctgacgcatttgtttatgatccttgaaggattttcctgagatcgtccaaaaaagcaaatgctccaaatttgttaaagacctttgggggctttggtaagtaccaactattgtgacagtcgaagtcaacaaactccgtgttttccgggtatctgctttgacaacaaaacttcgagagagctccctactaagtcttggcttctgcgttgccgtgtaggtaccgatgccatctcctgcgacgtcacaacgtccctccaatcgtggaggaactgcgaaatccgccaaaccgctggacatcggagagccgctaggggtgcacgacacgaacacggtgcgctctagagtgcgaaaatggcagcaacaaggcggcggggtcgttacagtcgacgacccctatgccgatgacggggaaaatgatgcgaagccgaaaccaaagcctgccaaagtcaagatcgagaaactggagaagctggagaagctggcgaaggtagagaagccgaacaaacccccgaccacaaggaagcgcagtcacagcacaccccgcaaacgggtggtgagcgatgagcattggaaacgaacgagaagtcgagcctcgacccagtcctcgtcgcgcaacctgcgcaatctgcccgcacctaagcgcatagccgaatacaccacaaatgaagggcagcttaggtctccacgggggaagcacgacgatagtgacgatgagaaaaaaggtcgcggtccttctaaacccctaattcgagacaccaagtccgcgggcgcacgacagagtatcgacaccatcacggagagcgactatgagacagaccatcctagatctgtggaaccttcggagctctcggacagattcaagacgcgctcgcctcctccagaggatgcgtgggcagcaagcgaggcggatttctctgagttgtcgaggagacgcaagcgcggcccagcaaaacctcccaaaggtggtatattcgcacacatgctcgacgagtccagaaaaatgtttgggattcctgaacccgaaccgccgagacctacacctacgccgactacgggccgtggagccaaaatcgaggcatggctttctgacacaccggatccttttctggatgaagtcgtttctaaaaatgatatgccagctcctctggatctgaagtcaggccgagcaaggcgatctcaaaaacttgctgacggggactcacagcctcctggtaccgagtctgaaccgtcaacaatcagcgagcgccggaagagcaccgatcatccgaagagcactgagtactcgaagagcttcgatcaccataagagctccgatcgcccaaagagctccgattacccaaagagcgctataaataagcactccaagggaagggacagcttttcttcaatcgacaaaacacacaaggcacaagatcgtgagacggcctcagaatcgaaaagagctagtatagataggacttccaagtcatctgtcaagagcaaaggggataattctgtcgaagacaagctttatgaggatagtgctacaacctcggagtccgatttacaaccattctccgatggtggctctgaagtatcaggacttaacgcacctgtaccacttggccgtaagaagcccttcccggtcaccggtcatcatcgtttatcgacgattgcttctgcggaaaccttgagcaccactatcacagacataaccgagcacgtaccgaagtctgcccctatcgaaaaacttgaaataaaactcgaaccgaaactcgaaccgaaacctgaaccggaacttgaatcaaagcttgaatcaacacctgaatcgaaacatgaatcgaaacatgaatcaaaacttgaatcgaaacttgccgaggaagcagaaaaagcagaagaagcagagaaggatgaccagttcgatcccgactcgctacccgtggtatcctcgcaactaaaaagacggcttaccactcacaatgacctcatgtcggtactatccgtctcggcttcgcggagcagaagcatccggtcgaatcggagcattcgtactaacaaaagtcgcctggcccacgcgacagttgaggatctgctctatgaactgtcaggtgacgagacaaagtatatgcgcgagctaaaaacactggtcgggggtgtgattccggtcctcttaacttgcgtgctgtcccgctctgattcagccattgccgcaggcctatttcggccgtctctggaccctcaagatgacgtgaacttctcgaagccaattgttaacatgggagtggcgatcgagcgcctcaagaacctccacaagcgaatcccgcaggacaacgcggatgcattgcttacatgggcgcaaggtgcccagagagtctaccgcgagtacttgaaggcgtggcgtctcggattcaaggatgtcattgtaaatctggctcctcgggaagaagacgaagccacaaacgatgctgacacgaagagcctggatgagggcttggagcgagacgaaaatggcgactttgtagatagcgatggggaaaaggtcgatgtggcctatctactgaagcggccgttagtacgtctcaagtatctagcgaagagtttcaagggtatcaatattctggagccgtccccaaaggctgaagaaacggctaccgcctatcaaattcttgttgacgatgcccgaaaacgcgtccgagatgaaagagcgaggctggaagatgactctgctgcttgtatcgacccaacacgcacaagagacccaatgaccttgggtgtcctccgcgggatcggcattgaccagactcgccatgtccgtgctcgcgatttcttcaatctatctttgtatcattcaagtggtcaacttgtggattgtcgagccgagcttttatatcgagacaacccggcaagcaaagggcctggaggcgatcttttgatttgcgaaatcgatcattcagaccgctggcttctcttcccccctatggacctaagatgtgtttcagctcgcaaaggagactcgaaacatgaaatcgtgctcatgctgcgcagcgcccccgaagatgcaaccaagtactggcaagaattaatctcgctccgcattgacgaagaagaagtcgggtctgaatgggtctcattgctcggatctgaccctattccgccttcaatttgtcgaagccaaagcttcatcagccgagctaagcagaacaaggctcgcaagccctctgctgttgattctccgcccaggtcgaatgatattgacatccccatcggcgagaaggcgaccggtaaacgacgctcgtggacttcaaaagaccactcgtctgagccaagtacgatcagctctgttatcgatgcccggagctctttgtcctcaatcgtcactcgggagactgattacaccactgggggatccgagctgtctaagccagcccgccctgacttacctcttcttccttccacagctcccaggagctcgctaactagtcaggaaaggactctcgctggactcaaacgatccaaggcaaagagattttctcgccacagtgacagcccggcttcagatactgcctctcagcacactgtatctgagaaagcacccgaacacagcgcacctgcggttgccgctcctcaaacaccaagtacaccaacaggaggtagattctatggcgaaacggaggaatcctcagctataggatcaccgagagaaaaatcgcgttcgaggattcctcaaccccagaagacccctgtcagggaaccctcccctgaatctcctagggtttcatctgtgccttcagtaaatctcccgctgattcccaaaatccgaactcctagcagccaacctcatctttccactccgacacgcatggaccccgaagatgaggaagactatcctcccctcgaattcttgcccaggcaagaaattatggagacaccaacaaggactaggagaaggaagtcgcgaagacggccaaaggatgatgatagccctccacctcccccacctcatcgctcgcctagccctgcccatggcaagcgcgcaactcacccagttctcacccccactagtggtggactcaagcgacgtggctcttctcccctgaagcacgaatatgaaccctctacagcttcagattactcagagaccgactcggacgcgtcaacagtgcgccactattcctactcatcatctgaatactcaagatccaatggcttttctgactcggaggatgattactcctcggtatctgaagacgaagaatatgctactcccaagccaagagcacacgactcgattactgatgccagttctctctcgccttctaattctgtgtcgcagggtggctaccgtactgtgccgctgcagcccaccaagaccagcaaagccattgcgtctgtctttgcgtggtccgacaaaggcaactgggagcttttgttccctgacgagtgtaccatcgtcgttagtcctggcctgatcgaggccttcgcggtggactctgaacctgacgattcctcatcaccaagaccgctcatctctcttgaactgacaccgctcgttcctattcgccgtggcaccgccatcgacattagtatccgctctcctcccaccgagcgatcccaggtcacatccagcaacaacatcatgttccggtcatgcaaccctgacgaatgcgatgccctatatggtctaatcaaccaatcaagaatcaacaacccaacttacatcgcgcttcaaaacgctcgcggtccattcaacagccatgcctctaccttcgaacctgccccgaaagccggcggaggcctgtttggctggccccgccccagaaaaagnnnnnnnnnnnnnnnnnnnnnnnnnnnnnnnnnnnnnnnnnnnnnnnnnnnnnnnnnnnnnnnnnnnnnnnnnnnnnnnnnnnnnnnnnnnnnnnnnnnnnnnnnnnnnnnnnnnnnnnnnnnnnnnnnnnnnnnnnnnnnnnnnnnnnnnnnnnnnnnnnnnnnnnnnnnnnnnnnnnnnnnnnnnnnnnnnnnnnnnnnnnnnnnnnnnnnnnnnnnnnnnnnnnnnnnnnnnnnnnnnnnnnncccagccgcagaaaaagctatcgcgcatcgagctccccacgctctctagccgaaggatccgaaagcagcgtgggaaccatgagcagcgcattttccgccctcaaacgattcggaaacggcagcaaaatgttcaacattgcccgctcaaccatcgaatcccgcactggccgcgaaggcagcatctactctggctccggtgattccggcaacgacccatcccccaactcgggcttaggtcgcatcgccgcagcagtcaaaggcgccgacggtatcggtctctcaaacgccaaggtccgcctgtacgcacgcgaatctgcctccaagtggagtgacatgggcgctgcccgcctgaccatcatgcccgcaccacccaagaacccatcccgccccggtagtggtctcagcggcgacggcagctcaccgcacggtgacaacgcaagtggcgtttcgcctcccgcatcaggatccgcctccccgcgcggtgcgctctcgactgagaagcgcattgtcatccgcggcaagacacacggcgagactctcctcgacgtttgtctaggcgagagcgcctttgagcgcattgcccgcacgggcattgcggtatccatccgcgaggaggatgaagacgcgtccatcgcgaagcagggtggtgtcgcgactggctctggcaagatatttatgattcaaatgaagagtgaggctgaagcagcttatacctttgggcttgttggcaagctcaggtattgatgagtgatgtgatgagtttgatgtgttgggtttatgaacgagctatggacatgaggtatgggggtgcattgttggtttttttctctctttttgcttttccttttccttcttttcttctttatatttttgcctttcttcagtcattattagctctttttcttttgtacatttagaccgcagttgaatgatatcccggccgtggaataatgcaatcgtctctcatctttcttcaccttctattttacagtgacatgtcctcgatattgagccctttatgttgttacttcacatttatctctgtgtctcaaggtttaagtgcttctatatatgccattctactcttgtatatatactatagtccaaataatgaacatgtatcataatacatcatcctaaaggcaattcctgaactgcgagacacacagtagtctaactcctcatttccgccccattggtcttcttgaagacatacccaatcaaattacactcatccttcagcatagaaaccaacacatcatcatcaatggcagcttcaagctcctcatcttcagccccagcctcattagaatcggactcggctgcaagcagagatgggtcaatgtgcgagtactgagctaaagactggtgcatcttatctttgggactcttagtctcgctttctttgtctttcgtacttttctttcccttcctagctatcttggcacgatgagtgccgtcccggatagactgttcttgtttctccatatcgacctcagaagctttaacaagagtatgaggtttcggcagcgactcatccgaatcataaccatcatcaaagtcatcaaagtcagaaggaggatccgacaagtcctcaccctcagacccagcatcaacagtagcaggcgtcgcagccccagacgaagaagcctcaacgtcagccggaacaccccgtccaccacaccgacagcccagcaactcatgcgtctgacaagccctgtcctcgtcgagcctgaacaaatccctgagttcagcagccgagaactgcgcaccactattactggtgctcctctcctgcataacactatctgcaagaccaagcttggtaacctgtctctgccaaatcttctcctcgagactgcccttgagtagaacacggtagatgcgacaaggtcgtttctggccgtcgcggtgaatccgtgccatggcctggatatccgttgctgggttccagtctacatcgaagaggatgagacggctcgcaccaatcaggttgagacctgtcccgcctgctttcgcagatagcaggaaggcgaagcaggagcttgcggggagacggttgaaatcgtccaccaggccctgccgtttctgggcgggtgtgctgccatcgaggcggaggtaggggaggcctagggaggtgaggagggttgcgaggagagagagggttgaggtgtagtttgagacgaggacgattttctcgtctgttttgttgcgcattgtgtcgaggagttggtcaaggacgcggatttttgcgctcgaggagggggataagtggcgatggagaggttggggaatggaggcgatgagggcggtcattgtttcgttgggcgtgttattgttgtttttcgcggttaggagggaagggctgttgctgagctttttgaggattgttattagttgcagggcactttcagcgttgcccattgcggtttggaagatcggggaggcgaggactgctttgtagatgtttgcttgaggacgggttggtttgcagaagagaacgtattcggtctttggtggaaggtatttggccaggatgtctgctgttcggcggagcatgaatttggaggtgagttctcgcagctcttcgcctctggactctcccttctcgatttcctttcgcgttgcttcgggctgtctgctgcgaacaattggggtctcgaactctcgaatgaaggacttgaaagttcctaggatccctggattaacaaggtccacggctgcaaagaactctctcagatcattttgaattggcgtgccggagagaatcactctcttcacggcgctgagcgattggatcgctagaccactcttgttctgcaaggtcttgagcctatggccttcgtccgcgatgataatatcgactccagaaccattcgccaaagcttcctggaccgttctgagtttctcatatccaacaatcatgatactataagcccggcccttggtgaaatcagtcagacgcttactcttgtcgtcaaagacaaaaacgccaatgcgctcattgccgagccacttgcggaactccttccgccagttattgataagagtgacaggacacacaatcaatgccttcttaatgacaggcggggcttcaaagacaggattctgcttgagcagagtccaaagcagcgcaatagtttgcaaagtctttcccaagcccatgtcatctgcgagaatggcaccttcaccattaaacgaccgcatgcccatcacacactcatacaagaacttcacaccctcacgctgatgcggtcgcaagttcttggtcaagagaggatcaacaacaacatccacaacctgctttcccttcggcacagatttcggccgcggcataaccaacgcaccaaccgccttggggtcatgacgcggaacgaccttccccataaccttgggagcaaccgtattcacaagcagcggcgccttataagccgcaaatttcgcgggtgcagttccagggttcgcattagggtttgtaacgagagctagcgagcgcttgagggactgtgtccgctcagcagccgtaggtttgcgtacttcacccttctttcgggcggggagggcttctttcttgggtgtgggcacagggtccggcgtagaggtaggtgctgacttcgtggcttccaggaacactctgccggagaggtattccttgcgcgaaatctcggagtctatctcaatctctttgccggagatagacagtgttgttccgggctcgagacgggcttcgtgcaccttccgtcccatctccttcccggcaatgtctcgtagatacacaaactctccgcgggtagagagaattccgtctccgtcccatgttttgtgctttttggcgcttggtttgcgcctgtctgtgttagctggttcgctgtaactggtgctcaccagggatcaacgttccgaggacctaccagagaacattgaaatatctttcgtcggatgtatcatctttttcaccggatgatgactgtgttgtgctgtcagatcttcgattgttaacttgtaggagtggctttcgactgtctatcggtgattgcacatccttgggtgctggttcgtcttcgaggcggggctttttggtaggacgactgggctcgtcggggttgttggtggaggttgtagcggagttcctaactaaaggggacttgaagggtttgaagaccatgactgtgttggtcttttctccttccaagattaagatggcgttgggatgaggacgcgacaacaggcgcgggacgcgtggtcacgtgagctaatgatctttcgtgtgaaggactgggcttggaggaaaactcgacttaatttagattctagctattgataccgataagaaagtttgcatcttcaaaaaatgtgtttggacagtgaatatcaattatgcttttacagtagctatgtataaagtcgaaaaaaagtctaacacgaataaaaatatacataaggcggatataacgttaggtcgcatcatctagaaagagcattttatagctgtgcagcagaaaaaagctgtgccttgcaaaataaaaatggtatacgcaaaatagtcccccaaacatcccaccaagatttaccgagcatcgtcggccagggccttgtcggtcaacgggacatgcttcgggccctcgtaggagccctggtggacgaaccaccagacggtaacgaaaatagacagaccaccagtcatcagactggcatagttcatcgacgcggcatcagtaggcagagcgtaagggaagcagaagataatagcgaaggcgatgatgtagacacaggccagggagttgacgatgtagccaattgtgtcattcatgtggaagtatccaggcacgaaggaagaacggcgggtcaagatgtgagggaaaatggccatgaagtacgaaagactggacaactgcacgaagcatcccacgaaggcgctgaaggcggtagtcgagccgaggtagatgcacgccaggatggtgacgagaccggtgcagatcagggtggcgttgaaggggttcttgaacgtggggctgatgcgtccaacccatcccgagaatggagtggcgccatcacgagcaatagtccagagcgtacggccggcggtgatgtaacagccacaggcagtgataaaggtaggcaggtaagcgacgatcagaagacccagagcgccgccacgggagccggtggcttggcggtagatctcagccagggggaagaaggtggtcgagtcgcgcacctggtcgaggtcgttgatggaatagaagattgcaatcatatagcagataccagtgatgaaaccgacacccatctgggccaggatagccttggggatatttcgactcggcctggattcaagttagcgattatagatggaatgggaaagaagaacactgacttggggatttcctcagccaagtgagacgagcagtcaggggtgccaacactgtaagcaccgttgagcataccagcgacaaagacgaatccttgctgggcataaccggttccgttttcccaagttgcccacacgagcttatcggtggcatatgcagagccgttcacatgaggcatcacagcgcacacgatgatggtcacgaacacaccagcgagaatgaagaacaaacccaggtttccaatgtgaggtaggaagcggttcatgaacaacacaatagcgcaacaggcccaggtgttgaggaggaagctgataaagacgttccattgtgagggcacgaagctgggatgcatcaattgatacatagacacggtctgctgagccagaatcaaagacatggatgcggcaccgagaatccaagccaggcaattccaccatccagcgtagaatccacacacgcgaccgtacttactcccggcggtgatagttgcccaatggtagacaccactggctgagggcatacccgatgccaattcggcaatggatgcggcgaccagccagtagcagatagacacggctatgctaaacaaggggttagctttggttggttgaactggtttgggagagtggcatacaattcatagatagttcctgccaatccaccgttactcaatgccaccaccacactacctccttgggcaatccatgtgtttccggtggtcacggctaccgcacagatactgagaaggccaaagttccgctctagttcttggcgatggcccgaagcgttaaccaactctccgtccactggaccatcgtgggtgtaatccggtgtaggtgcgatttctttctcagggacgtggccgatctccttctccgtcgaataattgatctcattcccagacatgttggatatgtatatggtaggggatttccctaaaaccagacgaatgcgaggtccaaaatgtacagctcccgaattgaagaatgatatgggaagaatcgaggcgaacacggatgttaagtaaaagggagtcaaaggcgtacaacggtatattatcatgtcacggctaagccgatcaggtcgggtcggtcgacatccacgcattctaattcctcaatctctggccaatcagcattcgcggagtcacatcattcggtggccaacaggtccatagtggggtcgccccagagttcctattggcggagccggagacaagggtgtacaaatgcactcgaagcggaaacttttacaatcaacgccgctgcatggctgaattacgcttaacctagaaggggagcttcagcagaagggggattcccatcccccttagtgtccttttccgtgggttccatctctacttcttgcttttttggggtgattggggctctttggcggggtcaaaccccagactctgcttacttcttatcatcgctactctaaatagatgtctatctaggattcctagagataacaagaccagttatgcatgcttagcataagacataaggcgatggttggaacattccataatccatgcagatattccatgcagcgtacccacataccgtatacttagtatacactattagagatttttcggagatttcccctatttgagattgaaacatatgattttgcaagcgagacaagcgagacaagtgtacttgacaactacactacttgtaaactaaagtataaatgctttactagcccagacacatcaaaggatcaaagcgtcaagcaataggtaacactacgggtataactatgtgggcacaaacagtctctgctgtccatgcgacgggggtgtctcatataaggtagaaattcactcgagttcatcaattggaaaccatcggaggcaatctagactccgaatctctttgcctgggagcacagttgtactagtgcagctgaatgtgggttgcgcagataaggcgactccgattttagcctcagatctagtgggctagtctgatatatattaattaagtagctgctagttaactaacaaagtcttatgactaattaagtttactcaagtgaagtcactaactaactacggcgtagctacacgttaatgaattaatctagagtataatatattgtaaaccgtactgcagtgagattaataaagtctctccttccgaagttcccgaagtttcgaatcttcaaacttcacatcggttcattcaatcctctccaagttgcatgtacaacatatgttgtatcagcccgtctccataaaagatgaaaaaacatccgaatctgtccgtttcccccggggctgggcagttcccaaaatccctcagaaaaaaaggctcgggccaataggtgactggaccatggatggtcggtgatttccccactttttacagttgtggcggcaaactcagaatatctgatttcccgatctggcaggtattggccatttttaatgaattccagtgcaatgtgttaaatatagtcaaatctgccgatagtgacacgcagccggtatatccgaacaaactctctattctgacagttcttcagggcttactccgtatacaatgtatgagttatgtacatgaatactaattgacatggatattggctgatccctcagctcctccaccctccactgtgggccattcccccagatagaaagagccatgtctatcttcgcttaacgacgatgattggatataacaattatatgtagatgtgcttatgtctcccagttcagaaggtaggtaacaactaggttcagtatggatctctcaggaaaattcagcctaaatatcctcggttataaaggcctataaactgtaagacagctgaacttacaccttacatggaaattccctatgcaacggtaaagtggaccaatggcaaaattgttacaaatcagaatgcagcaatgaaagcaatttcccagactctcccgatccaaggaaccaccttgccatccaagcccccactatccaatggcggctatatgccctgtatcttgggttgattggcgttttatcctctgcatcttgccaaaccttgtaccttcaaggctatcattcagcatacttcgaaggttctaacgcgtttcctatctcgtcgtacaatcggcggcttatgcaggagctggaactctatacttaatattgcatatccccgctactctcataaaatgtgagcgcgcctctcgactctcgtttcactccaagatctcgttaacctctattcgaaaaggccagcggtaatgtctggcttaggaggccacttcgccttggaattcgcccatgagacatgggctctgtatgctgtcggcgtactgggtgccgtcttgcgatggtacgatagtaattgaacatcctactatatacaacactgacaaagatcctcgacagggtggctcgttttcgacgcttaggcattcgcaatctccagaccgacgactatcttatgctcttctcggtagtctggtatacaatactatgtgtcgccttaaatcaagtcgcctccggtggggggtcaaatctcatgaccgaggaggacaggaaatcgttaacggataaaatcatcgcggaacgagtgcgcggtagcaaatgggtctttgtgtcggaacattcctttattctttgcatctggagtttgaaagcatgcatgctggtgatctatgcgcgtatcacgtatgttgaacctcgattgggagcatgttcttttctaacgccaatacagtgaaggattaaagcagaagcgttggatcaactatgtctcgatctacgtcggactaggcttcgtcgcaaccgaactgtcactcttcctactctgccacccattaaaagactactgggccgtcgtcccagagccagactaccaatgctcatcttaccagtactacgaaatcgtgcagggctgcatctcaatctctgccgacgtattcatgctcctcatcgccattcccatgctagtccaggtccgcgtcccgctcaagcaaaagctgatcctgactatcctcttcggcatgggcgtcttcgtcattgtcgccgccgtcctgaacaaggtgtactgcctcgtcccatctctgatctcctacgtctacatgaactggtacttccgtgaagccaccgtcgccatcctagtcaccaacctgccgctcgtctggtcactgctccgcgacgtcttccccgccctcaagagctggaccggcggctccagacgcggcaccgaccgctacaagtccgggccctggaccagcaagggtggctcccacctgcctccctatggcccgcccagccacacgcgctcaggcgacttcggcatgcaagaattcgaaggcaccactacgattaccccgcaaaaggcgactgcttccgatgccagtatcagcgaggggcgggcgagcagcgacgatggctcggctcgcgctctgcgcattcgccaggatatcacggttacggtggagcgggactcgcggccgtcggattatgaggtgaatacttcgcgtatcacccgcgcccgcgaggaggtttaatctttaatcgactctctacacggagaacgttgtcgttctctttttcttatgaatccacgaagtccccgagggcttaatacccagtcctgtatattgtctctattttgtctgtacatatttacttctagacactaattgtgcatatctttttttctctgaatatagagttttccttggagtctcagttgaattgcgtattccattaactataatctccactgtcatgtccacacatctcagcttccagtcccaccgatgtccaaaaccccggtgagttaaccacttttcaaagatgcaaccttggaatacattccatcacagcccgccgatctcccggccccttgcatccagatgccgatcttgtcggtgaagagcttaggcctacgtccgaagaactctgcagggatttggtgaactggcggatatggctcgggcgtcttccttgaaaagcacgtatccccggttccgacaaccaatgtggcgtcgtagccatgcaaagccaagatggttcatgactatcagcactgaggccaagccgcacggagtaactgactagtacatcatccttgaatcagtcacaggctatatacatactacccggaagaccaccgtccgaaatcacgtcgtgacccgagaaaaaaggcgaaaccttgggatcaaccaaaatctcagccgaaatctcaaccgaaaaatcgttcctcaaggttcccaccccacagtcgatcggcacatgaatcttggaaaaaaatctgatacgaaagaaaaagactgggacccgaaagccaaagatatgagggcaaatgcttgaccgagcaatatccaagtggatgtgttcatggataccccaccataccaaatccaggaccctggccaaagccaccagttcactgcgcactaccgtggacgaagctcaagctctcccgaacaacgggatctgcgtggagactagagcgacctcgggatgtgacgtgataagggaaaaatggagcaattagcaattgtcgtcggtcatagtatctgcttgtgctcccgaggtaccctttgtgtttggaattgcaatggatactgtgtatggcgtattattagaagactgtctacggagtaaatgtgaactatttcagtcgaccgtaagccgcgtcagtctaataaatctgagtttcaactgagtttcggcgacccagccttgcaggaaaccttgagccgtcaacttccttacaatatatatgatgtatcttatatcttgtaattgacggagtccggcagatatataagcccttctgctagatgtttaaaccctaaaccacgtgtcttcggcctcatttttgagtgataagccgatcagctacccctattcgagcaagctgcacggataatctgctatattagacttctgccatgtgctggaggggttcactcgcaaagttagttcaacggcctcggtacttgcatgatcatactcgaagtcgtactctcctcctattatttgattgcactccgtacactatgttgtatctactccgtaccatagtgggccccgttcagccgagtactgtactatgtatataacagtttatcttttcctaataaggaggtaatttgccttttcctttcctttttcagcaagtgcactattcatttccttttcgctgtttttcttttcgcctttcttctcttctctgcttcggcgtaacccgcttgaccccaccaagaccaagacctcgcccttcgaccgcggctactccgtacatatgttgtatgtgctgacgcgctctgctctgagttatgggcccactctctatttgcatacaaagttgcccaggcttaacctctcgcttacagtttggatggctgcggggatgctcacctaaataggagctttgcccgttgattcggccttcaggtacggagaacgccgtgcatatgcagggttggcaaagaatcatgtaacattacaacatccatggtggcgaattgccgggcggtttgccttcgctctagctgcgtctcaggcatgcatgagtagtctctaggtaggaacggttcttcgttcgccgcgaatgtctcgtataaaaggttgaatgtggttatcacgtgcgacatttggtccaatctttctcgaccaaagtctattcgaaacccctcaatagtgcgagtttacaatataacagaagtatacctcagaaactcaaccttgggagcatccatataagcaaaagtccaccttgaagtctaaataaatgtcttgaggttgcgttatccatgaagggtcccgggcgaaatatatactacggaatgatttctggcatagctactcacaaccttcaatatattcacagatctttgatactacgtactttaagtaggtagtatacacagactagatggcaccgacctaatcttgcgtatgattgaggctagaagacacaaaaattatagactcttgttgtttccgtttattgaacttactttcgagtgcaagagagttcgttgtcatttagatatcacaaaatgaagtagacccgatattataggacacccgctctggtcaagaccaaggccggctatatctcagcacttggacagatagagggtatatatatatccgattctgagataagcacgtcgtctacaatatatttccacccttccacaaggttacatatatcccaagtcatctctggattttgagatactcgagaccttctatgcccatgtcggatgttcacattctatcagggcaacggaagcataccaacctcaccaatcatgtgttcgtcctgcaagatctatgaagtcgatacacctaattagtgtgatgtagttaagagctggttgtggtttagctgtctcattcagaattcattcgactaccatgtgcttttgcttttacctacaatagggttgaaatatacataattttggttgaattttgagatagagaaaatctattaacatgattgtcgaggctaataagccttcgactcgggacgtatccaccctgcgaaggctacataagtacatgaaaagagaatgcgaaagatactgcaacgccgtgcgaacgtaaacaaagccggaaaacaaaatcatgagaaagtcatgtaccaatgcgtttcgcgttttagcataacaaatttaagaaacccgatcctgtttaatcgtacagatcaggcgagacggggttatcagccatctcagcgtcaagatcatcctcgtccatcatttcatcatcgctcatctcactagcctcgccaagatcgtggttaggcaagacatcgatgcgactgtcgcgcatgacaacatgggcgacctcgccatccttgatacttccgcgcagaatgagcacagcaagacggttgaggatttcgcgctcgatgagtcggcccaagggacgagcaccataggctggggagtagcctgctgcgccgaggtagtccttgacttcgtcgctacattcgatagtaacattgcgctcgttgttgtcgagccgcttctgcacctcggaaagacggaggtccacaatcttgcgaatctcccgccttgtgagacggttgaagatgacggtgctggagatacggttaaggaactccggcaggaagtagtcgcgcagagcgttcatcaccaactcgcgggtctggggctcgatgcgaccgtccttggtagtcgggcgggagagatattgagcacccaagttggaggtcatgacgacgatgcagttctttgcgtcgacgacacggccctggccgtcggtgatacggccatcatccataagctgtaggaggacagtgaggacttcctttgcggccttctcgacctcatcgaagagcaagatcgagaatgggcggcgacgcaggctttcggtaagttggccaccggcgtcgtggccaacgtatccggggggtgcaccgatcatacggctgagcgagtgtcgctcttggtactcggacatatcgaaccggatcattgccttgggatcatcgaacaggaattcggcaagcgcttttgtgagcagtgtcttaccggtaccggagggaccacagaacaagaagctgggaggcgcgttagggttactgagacccgagcgctgcaagcgaatggcgttagagaccgaaacaacagcttccttctgaccaacaacaaccttggaaaggtatttctccatgttaagcagcttgtccttttcagtggtcttgagtctgttaacaggaataccggtccagcggccaacgatttcattgatttgatcgggaccaactgcatcggcaaggagtgcttcaccagagtcgcccgcttgagcgcggcgttcagcatcagccttggcccgctcagtctccagacgctcgatgagagctttggtttccgggatggcgtagtattcgagatcagcggctgtctgggtatcgcccaatcgttcggcttcgtcacgcttgaccttgagagaatccaacttgatcttggcctcctgaacttcgcggctgcgctgcttctcattttcgtacttctcgcgcatcggccgaagctcctcgccaacattggcagcttcctgcttggcggcctcgagacgagccttggatgcttcgtcttgctcacggccaagggcgtgaatttcaatttgaagctggcgggcctttctttccagtgtgtcgagggcttctggctcggactcgcgagtgactcggactgcagctgcagcctcatcaatcaaatcgaccgcagaatcggggagtcgacgagctgtcaggtagcgagatgcgagagtggcggcagcgacgatggctccatcgagaatgttgacaccgtggtgagcctcgtatttttccttcagaccacgaagaatagagatggtttctgggactgtaggctccttgacaaggacttgctggaatcgtcgctcgaaagcctgatccttctcgatatacttgcggtattcagagagagtcgtggcaccaatacaatgcaattggccacgagccagcatgggcttgagaaggttggcagcgtccataccgccttcgccgctagaaccagcgcccataagcaggtgaatctcatcgacgaagaggagaatggtatccttggaatcttcgatttccttgaggacacccttcatacgttcttcgaattcaccgcggtatttgctgcccgcaaccagagaaccgacatcaagagaaagaagacggcactgagcgaggttggcagggatatcggcgttgacaatacggcgagcgaggccttcgacaatggtggtcttaccgacaccaggctcaccaataagcacagggttgttcttcgtgcggcgactgagaatacgaatgacacggcggatttcctcctctcggccaatgaccggatcgatcttgccctcacgagccaaggcagtcatatcaatggtgaacttcttcaggttttcattctcgccctcggcatcggcggtcttggagtcgacccgctttgtaccgcgaatttgctggatagcagtgtcgatcaacttgagattgggaatattggcatcgcctagcgcacgctgaacttgtgaatcctggcaaacagactgaatgagatgatcaactgcgacgaagctgtccttttgtgttttcgacaaatcggtggctgcccgaatgactttagagagttggggagaaacactggggttctctggagggggatcttgactgggcaggcggaccaatagcttcattagcgatcggtcgaggagttgagggtcgccgtgggctcgttcaacgacctggcggaagagaggggcggctgcggaatcgtgggatgcgtgggcaccagaaggagtctgttgatcttgagactcatctggggaggggttgagcaatgcgactgccaagtgaagaggcatgatctgggagtgtgcatattgctcgcagagcccgctggagtccagcagggccttgttggcccgatctgtgaattggacgccgttcattttgaacggaagagtggggtaatatcaattaggtttagatgcactgatatagatgcactgatatcccgagggggattatagcagtggtgtaagaatagaaagtaattgagtgagtagacttgagaatgattgacttgaaggacgagaggctagttcatatactctgctgcgcggggtgcccgaagctgccaccacatccatgtcgtcactactcgtttccaccgccttccagaagctgcctgacattgcctgacggtgccagatattgcctgatgtttccgaacaaacgccgaacatcggagattccggagaaaccattaatccatagtaactatggacactcaatgacacttacattttgcgacacgcatgcactataactagtcagtcaattaccgccttattttataaggtaaggtttcccagggccaatgttgttattcaaggtaggtgtcgatccatatttagtcaattaagccttattttgcacgaggcaacagattgtacggaacactccgtaccgcctggcagattgtactggcacatgacatgtcaaagtcagctcacgtgaagcggacgatatagacacgtgatgatattggcacgtggaggcacgtgatccacgtgacaatggagttgctgacctcagccctatccgttccgagatgaggtcagcattctcggattcttggaaggttaaatcgcgcaaaccagaacccttggatgttcaggctctccacgttagagagatgattcggcattgatgttcctcgagcttgcgtgccttgcagtggagcattgaaacaactcagttccaccggctcctcttacccgcaaaagtccagatatgaacaaccgatgtggcagccaggcgccatttacatagcaacaattactttcagccaggcttctgccatgcgtcgcgtatgttttttatatcgtgttccacgatagccgacagaaaatatcctacagctagtgaatgacgtcaggtgggatctccgcagagcaattaaaattcgaagaaatcgatctggaaccttgcccgggatcagacctcccccttgcaagtacctgctcagactaggccgagggatttttatacacgctttatctgtgcctttggaatcagcaccgtttaggaaaccgactttcacggggctgcatgcgagaggagtaccgtctcagatgagaagctaagagacgactggaccgtggatggtggacacttgttccaggtcgacgcatccagaattgaagatcgatccacaggcctgtccacaaggtgttgtcctattggccgtttcatcacgggaaggtggtcttgagattttttgtttcgtgtctccttggctggagagggatgagaaaaaatagaagcggaaaggtttctgcggggcagagaggggcaggaggctttatggcgttcatgatttcaacattgctcccttgcctaggaggcatgttgaagccaatgaagccaatggataagattgcatatgtattatgtactccgtgcatggtatgcagtgctacatgtaccacatctatacgaagtactactataacaatcctactatgtactacaaggacggaccatgctatactacaagctagcttatacgtaaaatgcctgggctaactaactgattcgtagatctgcctccataattacatatttttcatttcttttccatttttccaaggtcaaactaggaatccaactctggtagctctccgcatcccgaaggctccctgaaaaccaatgaaatcaaatcaaatcggcaattaaacctggtacctatgtcatttgttcatataaagagttttaacccccccctctgcatctctttttcattgttctaacgccatagttgcagctgagacaactagaaagctctcacattcgctgtacgtttgtgaagaaaagacccgccacccaaaccagaaaatttctgtttcgccacagcttcaacggctggatttgaattatccctgctttaattgatcagaacgtgagatccactggacgtttatttacaattacctttgttgacttttgctgagattgaacctgcaggttacagttatctcggtcagtattaaatcatcgcaccgcatacaatatgtcagacaagccgatctttgtggctacgcatccgcgagcatgctcgacggcctttgagcgagtaagagatcccgagagattcggataaccaatttattctaaacacatatctaatggcctgcaggtgttcatgactcagcgagatattatccaatgtgtccatgagccgttcggtgatgcattctattatggcccagagcgcctatctagccgattcgcaggcgatgaacatgcgcaagaacgcgtggatagtggattcgccaactcgacatatagtaccgtgatggaaaggctggagcgagaagctacacaggtccgacccttctttctgcgaagtctctcgcgttcttacccatccccctcgtaatgctcttcaagttctccctgtggatcgaacatgagggaagatcccttacctgtttactttttttatcttgcacagatgtagcccgagacaatttgtcccccgtctacaactgtagatcacacactggctccaaattattgaccatggagacccgcacgacggaatggaatgttcgcactttttgaggggatacttaccttgttacagggaaagagagtctttatcaaagatatcgaccactatttgctcccaccgaatggtcagcccgccagcattgccccttctctactgcgcgttaagcgaggagtcggcaccaacggcgactcgacggctaacggtgtgaacggtgccaacggcactcacaccaatggccactctgtcacgccaaacggtcacaccaacggggtcaacggagcctcgaatggaaccaacggcacgacgaacggtgtgaacggtcacaccaatggaacatccaaggaaccctacccgtacgacacgcccgcagagctgggaaacccaacggtgatgcctcgcgagctgcaagagaagttccactgggcattcctaattcgtgacccgcactacagcgtgccgtcgtacctgcggtgcacgatcccacctctggatgaggtgaccgggttccacaactatgacccgctggaggccgggtacgacgagctccgccgacacttcgattatctgcgagatactggattggtcgggccccgggttgcaacgcgcccggagctgaacgcccagactgatgcgcaggcgccggctggcgttgaggtctgtgttatcgacgcggatgatatgctcgatgagccggcgaagaccatcgaggctttctgtaacagtgttggtttgccgtaccgcccggaaatgctgttttgggataacgaggaggaacatgctgttgctcggaatgcgttcgagaagtggcgtggattccataatgatgctattgagtcgaaggctctggagcagagaactcatgtaagttttgtggtcattgatgtgggggtatggggacttggactttggactaacactgtttatagaaacgtgctgtcaagaccgaggaacagtttgacgccgagtggcagaagaagtacggtgagaagcaagctgctctcatccgccgaaccgtcgacgccaacatggccgactatctgtacctcaagtcatttgtcgtgaaggtctagaagaaataagcgaaacaagagtggaagagaaagaagagaaagaagagaaagaagggagacaagggggaacctaccccatattatttcttatgagaacgatttggtacggatggcgccatctccacggggattggttgatgaccatgacgatcttgcgtattgcgtatgctctttgttccatttggccgatgttatagctacttgctggattttcaagtttacttagcttaagatatagttaagtactggctattgaccatgtcgtattagcctaaggttgatatatacttccggcagttccttcctatttgggccatccacggattaataggccagtattccgtagctctttcctccctttcattactttacactgtacctgcctattaagtctcgtcaacacattcgaaaccataaacggaaagtccagaagtatcgaattgggttgaggttgtcttcgcccaagtgttgagaccgtttctgcctcagattattcgtccgggtacttcccttcccttcccttggcagcccccggtcattacttactaccgttagatctattcggagggcgtctgagaaatacaactactcctataagacaggcaaggatttcgagtcgtacaagcgccacagtcattgctaatattcaagctaatagaatcataaaattttcgacgtgtcaacatatcacttgaaatacaaatatgaccaggtattctttcaagtaccgaaattaatggataaaggtcaagtctgctagcagcatggccgtctgaggcagtggtgcgcgcctatttgtggaccttggcgttagccttgagggcactgttcggcacatagagaggcatcgagtcctcccagatcgaatcagtaagcacacgcttattcgagccatcggcattcataacgacgacctgaccataaggctggaaagtctgatcatagagagcacactcgtactggaagccgaacatgccggaagagtaggcaatgcgaccatcccaagtccagatggcatgagcatcattggcaccactgctagtgagaaccttgacatcagttccatcaggacgcatagtgcagatatcgtagttgtaatcactggtcttgcgggtaaagacgattctctttccatcgggggagaaggaaggcaggttatcccactcattggtcaagacagtggtcttacgggtctccagatccagaacacggagtccgagctgggatctgtcgcccagggtggagtttgttccccaaatgcggaagacgatcttcttgccgtcgtgcgagaagctggggaagccggagttgatcacgctgctgttgctgctgagggttgtggtgctctcggacaggacttcggagtacgagccattggcagtggctcggacaagccagccgccnnnnnnnnnnnnnnnnnnnnnnnnnnnnnnnnnnnnnnnnnnnnnnnnnnnnnnnnnnnnnnnnnnnnnnnnnnnnnnnnnnnnnnnnnnnnnnnnnnnnnnnnnnnnnnnnnnnnnnnnnnnnnnnnnnnnnnnnnnnnnnnnnnnnnnnnnnnnnnnnnnnnnnnnnnnnnnnnnnnnnnnnnnnnnnnnnnnnnnnnnnnnnnnnnnnnnnnnnnnnnnnnnnnnnnnnnnnnnnnnnnnnntcgtacaagccagccgccgccggtggcgcggccttggaaccagaagccgactccgaaggagacccacttgccatcgggcgaccaggccgggttgaaggcgcctgcggtgcccttggcgacggacgacgcgtcaatgaagtcggattccatgtcattgtagactaggctctcgtcggttccgttggcgttgaaggaaacaatggaggagtttccaagctgcttctcagtcagagcgatcttgttggtgctggacaactgggggaagacgtcggtgaagcgatattcccactccgtgtcccagctgtacaacttcttgtccataggacggatagtccaggcgttcttctcatagacgaccttcttgccatctggagaccaggcaggagagcggataatctcgctagtggtgttcacgtatccaccggcagtggtgtggagtccttcgataccggaacccttgccggcgtaggcgatagtgccgttggggagatattgagggaagagcttcacgccagttccctcggcttccacgcgacggttagcgcctgtggcaaactccacggagacaatgctggagttggcagagttgagtgactcaggacggtgagcgttccaggtgttctcacgagtcatctcgtagtaaacaatacgctcgccatcgggagaccacttgggcgaaccaagacagtaaccagacttcgacacgacgggacggaaatcagatccattggggcggatagcatagatggacagctcctgtgtatgttcccagccggtgacaccttggaagatggggtctccgtgtccgtaccagccagtgttacggtccgacgagaaagcaatccattggccgtcgggagaccacgaagggcggaaatagccatcaggaagagaagtattggcggcagtcgagacggtatctgtgaggttccatttcttgccactctccagatccaggacccagatgttggccttgtaaccattggcagtggacacataggcgacttgctttccattcggagacacgacagctccgtcttccaccgaggaggttgctaccaactcctcaaggtcagacccgttggtccggacgcggtagatatccgaattaccgtcaccattgcgctctccggtgaaggtgatccattctccatcgggggaaaaggtggcatggtattcatagatagagttggagaggagaggacgttcatcagtgccatcaacattggcaacataaagctctgatgtcccgggagcaatgcggttcatgtagaagattcccttcttgtcagacgacgccgccttgcgcggttcgtgcgcatgcggagagggcgtgttcctcttctcaaggttcatctgctctgcatatgggcaaagagccaaagccgacggcaaggcaaggcccagcagggcaattgaagcgggaaaatgcatagtgaaaatgagtcagtgcaccacagcagttcaaggaccggagcccgttatttctggcaccgccatacttatacataaaacttctgcaggggaaacaggcctgaaggaccgtagcgcacttctctcctccacaggcccaccttcgcgtaatgaagtccgcgttattagcgggccttcatcttatctgatgaagcaagctagcgagtgaccaccgaccactgaaaagtcctgcagaatatttgaccattcatctgattggctctgtcaaatgaagctgtgacttgcagggctcgaaacaaggcaatgatcgtcgtggctcgagatgaacggagaaagcctcttccgtcggttaccgatacattattgttgtaccttggggttttgatataccctgtctgcacaaggggtgtatatctatgcgcctaagtcgacgtacaacaagatcagggtctgcagtatgcaagagagagacgatcagttcttacgcacaactaccgaccctcgatacgtcaattagggctcgggtactggagcgagaaacccgaatgccaagaaattggcacggagatatccctttgatcttgcacaatatcctgctgacccaggcaactccgcctatctcgttcgtcaatataatccaccgaccttgcaagctcgagcgccgacgcaattcttcggcttggcaactaccattctggcacgcaaaatctgcccctttcttggtttaatatcgggaagactcgtaaaactcgagttaccgaattaggacgaaggtctagccaatcaggaagaagacacctattttacaccatctctacatctattattctcgatcaagggtcttccttctgagataacttcgtcagggcccgattaggattcacgatctaggcagtttaggaacgccagttaatggaatttggagtctccctgatcaatgtttcgagtcttcacgagctccttacgaatctccccgagctactagcccctctttactcttcctgcatgcccaacagcataaaaattgaatcgttggacataatcggagtccgaatatcggtccggactaccagattaaggggataaagcgtagatcgaaggtggatcagtctcattgtcgtcttggcactgggctgttgtcaatgaagtgccaagtttccgagaggccggatcctgaagttcgccaataagtacgaagtacagtgtagcgtgggaaggccgttgataatggagccacttgcatgcatttggccaggaggcacgcccgatattcaatactacctacaacatacaacatataactatttctgaattaggaagtctagactctacagggctagccttatggtatgcgaaacacagtgtgctttaatcaagtcaatgagagaggatgtttgttgagaaggcataaggcctctttagtgcttagtgagtaaccattgacggttctcgtgagcaagagtgggtaaagtcaatgcatttgatacgagtcagaggacagaacaagagtggactacagggaccgaggcacgggatccttcaaagcgtagcgtaagcttgtttgttgcctgcccgtgcggtgacttgggactgcttagttatctgggttttagacagctctagacgttgggaggaagctgtagacttgaattgcaagagctcctaccaattcgatgatcgaggctctagaagaccttgagacttcttcggcggaaatgtggatcttacagaagattatgacgagtagattgcgagtagattgctatttaacagccttggcttttcagacactcatggttgtgccatgtcctgaggtatcgttaacttcgataaacgtctggggaagtgttgccccatacaaaccgaagactgacacgtcagagacagacaacagtctcactagcaatcttcggtgatcggcgcaagcatgggtagacgcaatgctgcatcctaggttacaacattatagaagggctaagtgactctagtgtaaaggacgcgaagatcgtaataactggcctggaatcatatcattcgttatggccaagcatataaacacctcatctagcgccaaaactcatcaagaaacatacacaacctgcaaggcattgaaccccggccgaaacagcccagcaagaaaaagaagatatggtatcttcatccaaaagtacaaaccactatagaaaccagtccatccaagctaagttccttcataccgcactgtagccaccgcgcgagcccgctccttgcagagtattgaccacacgacggagccagtcctggaagaggtaagggatatcgcggatggtgtcgccgtgggggaggagatcccagccacgggcgccgtaacggttgtagttgagccaggagccgaagatgagataggcagcgatgccgaggaaggcactgaatagaatgattagtagggcaatttaatgcggaggccacaagaaaatgaagctcctaagaacgaagaaaaactcacatgataagcaaccaggtaaagaagccccagctcttagatccgggggtatcacccttctccttatcgtactcgtcgcaggcatactttgtgcgccaatccaatctcaggatataagtatcatcatccgacggaccaaagctcttgaactgcagactactgctgctgttgcccgagggcacatcgccaccttcctcgccatccgctctccgtcgtcgctccttcgtctcgacgtcatctccaagtgtattcaggccctccagtccagatcggtcgtggtcgcactggaagtcaatgatagcgcctgccttcttggcattctggtcattgccatctcccttgtatgagccgccttccaatttaacgcgtaatccctccgtttccgggtcgagatccttcaatcgcttcagttctgggttcttcgagccctggccaacggggtcgagcccaacgatcgggaaaccgaatgtagagccgccatttccgtcctttgctactcgatgcacgaatccgcaaactggagaaatacataaattagcgtgaacaccccaagcagatgaccaactcaacatggtcgtgtcatctcagcctagaacgtaccgtttttgctagtgccgcacgtcgcatcgccgtaccgagcagcgccgccgaggatattgcagatattcaatcgataggttgtattcgtcacgaagtcatccgtcgtcacggtgtgggtcacctcgtgaacgccttttaggggactgagatcgtatttgtaattgtcgagcttgatgtgcgcgcagtcgaatccggacgcggatgccagactcggtaggagggcggagaggaggagtgaaactccgcttgattgtattcgcattttggtcaatgtgccgttgggtagttaggtggcgatgggtagagtggaaggacgcgggtgaaggctgggatgaggctttcgcgcgaacggagctcgatagctcaagtggagatggtcacgagggacagctgtacacaggacaagtgtaaccagtgcagtttgatcgaaaatggaggagaactggttaccgagttcggggtccctgtgaggttgaaaagtgacgatgacggggatgatcctacggaggtgtttcgtttctccggtggcggtgttttggcactaaaatgtgcttcactcaactcggaatgaagatgcctcaaagtatttgaagctatctctggagtttaatagttcaatgacttttcaacatgttttttatattcttcagagaaagtagcctatgatgtcactccagatgtcacctcagtacccgatggcctaacacccgatgtatggatgtaaagaagatagaagcaaaatagaagaaccgatatatccgaaaaagaagcctacataaggcctattaatactctgcaacctatatattctactgtatagatccctatccctacaaacaccaacctcatccagctcatcgccacgcacagaccacccactcaaacccgatatcaaacgcgcaaaccaaccaacccgcaacgaggacagaacaaatcccagacacgaaagaacaaacaaatcccaaagcccaaccaaataaccacccaccagacagccaaaatggtgcagccgcgtatggtaagcccaacccccaccaagctcaaacgcgacaaaccccaccaaagcccagctcgcaagctaatcggatcaacgcgcagctcacaaaagcggacgagacatcagccaatgatgagaatgaagtccgtcgcgaggatcaggagaagatcaaccggttcagtcggttgcatcagcgcgagaccgtgcttcaggaggagttgaaggggaagcaggtatggactttggacttttgaggattttgttctctgccatgtatcggatctcttgctaactggtttatagaaggataaggaagatttggaagaggtttcgatggagttggagcttgctgatgaagatgagcttgtgccgtaaggaatacctttcccatctattcttgcttttgtttttttcgatcatgttctgttgtggcttttctctgtgattctcatctcggagtattacgaagaaacctaaaaaagagcaagaacaggaagaagccatcactaacaaccttcacagctacaaaatcggcgactcattcttccaactaccgctatcagacgcgcagggaatgctctcgacatcaacagagaagatcgatgcagatgtttctaagctagaggactcgcttggtgagctgcgtgaggaaatgcagcagctgaaggttgcactctatgcgcggtttggtcggagcattaacctggagacttgattaggatgaattggatgtattaccactatcactttttgtctcttgggacttatttctcatgattttctattatctatcttaaaaatggggaccgaggtttgacaatcttcaattgttgtctagattaacatgcggatggatgaacttcatgatatgtttgctcatggcatctgcttcatacctcataattataggtacatggtatgaatatgtagataaagccagacattataagtcaggtggaaccacagctcgttattatcattcaaatagaacacggtagtaaagaggtatctaagaaggcgggaagaaaaaaggagagaagagaaacacaacaggaactaccaacgaaacaagtaggcaaaacagatggctccaaacctgtggcatatatttaggaaccgcagggttccacgcgaatcgacacagataacagtgatgcctagccatctggctagcggtgaccagttcaccgatctaaaaccaatgtgagggtcctccaaatcaataaaactgaagtcatggccgcacttctgtacgccgatattgtcgtgggcctcgtccaggagggatatatatacagcgcgcgcatttgtgttttatgtgtttcccgtgtgcgaaagttgatcaccggaacttggcacggcagcggcccatgatctcattctggcagaccagttcagcgctgaattcactgccgtctagtgtaaggtagatatcgaagtagacacggtagaagatgccctggggtgtatccatgcgctcgaagtcggtctcgaggttcttgcgagagagatcggatgtgagtgtgacgagttccttgatgcctaggaaaatattagtaatttgtacaaggaaaatgcaatctctcaacttacgtggatccttggtgtattcggggcagacatcctcatcgcaggcgtacagcacgtcctcgtacatgagggtagcgccaggtgcaacttgacggaagaagctgaccttgactggttcgccaatcctgacacgctctcccttttggacaaagatttgacgggtgtacttgcatcgatcgcggccatccaaacttggtacacggtactgttcagggtgatatccctccttgaatggctgaagcgtggccatgaggtagtgtcgacgtgccacacggtgcgtgatgacccgctcggtaatacctgcggtgactgcgcccttgacaatggccgccacagagtccatcggacggaccacctttgtctgatactgtggtggcacgtggagcttgatctgctggaagaggtattctgaagcaccaaatccaccgacgaccagaacgttctacacaattgttagcactgcattgagactaggatgagatgctcttacctggagcagacggttctgtgcttgaatggcgataatctggttgcgcaccagctcgaggatacggttcacgacaggctcgaaacactgaaggatctcctcgttcgtgaaggtcatgtagccttcctcaataccagcatcggggaagtcggcctcgatacccacgtccactgcccatttttgtccattattgcggaagtcggccttgatacggttctcgaagtccatgatacacttcgcgtagaccttgcccgcagtccgtgacccatccggcagcttcattttacggatcttggcgcgcaagatgttactgaaattgcggttcagtgccgtcgaaccacacgagtcaccagacccggcagtacattccatcacactgaaaggcgactcttcctccacctcatatgcgatcaaatccacggtaccaccaccacaatccacaatcaaaatagcatcgcccaccttcaagttgagcagtccgctcttggcacagaacaaggcggctgcctcgggctctgagactagcgtgagacggttatcgttctcgtcgcgcaagaagccagcttggatagcagcagtccgggtcgcagccttgccggcgtcgttccaaatagccggtaccgtcagatagtaacggatattgcgttcctcgcgcgtgaacacctctcccagggccttttgcaggttagcgcgaatggcttgtcgtagcttgaagaggtaatcggcagcgacatcgatttcggacttgcccggggggagggggggcaagttgatgggatcaatgtaggtgtttccagagagcatcagttgaagcttgaaccactccaccttctgcacttggggcttggggtatccggttggggcgagagcgtcggcaatatcggggccccatcctaccaccttttggtattggtcgtagtagaggacggtaggaatctaggagagcagatcgttgtcagactagccttcctggggtgtacttgttaagttgcgctcaccttttgttttgcatgggtcccggcgcctggccattccgtgatgatgtcctcgctggcctggttgttggtcgcaaatgcatatgcgacacccgagaaggttgtaccaaagtcaataccgacaatcagttgggccttgctccggccaccaccctcaacttcgaccgcagggttgcgccctggatactgggtattggacagtgacggtggaatgctaggagccatctgctgttgctgcatcccataccccggcgggccgttcaagggagcatttgagttgtattggaggtttgtggtaatgggcgggggctgttgaccatgcgccattggactagttggtcggttgtttgtgtaacttggcggtcggcctaactggggctgggtctgttgatggttcattggaagacttgttgttgatgaactggaggggggtgatgaaggggtgggagggacaatcgggttggaattaggaggagattttttgttcctaaagccaaaggacttaaatcgggaactcatgaggtccatatgaggcaacaaggaagggaaaagagtaagaaaccggaaggggggggaagatgaaagagggggaaagtgaggctgagggatgtaaattgtggagatcaaagagactgaaagaatgacaacacggaagataatcagtttacagtaatttagttttaaaattagcaaattattagaagatgaagaagatgaagaagattgacgatttaaatcccgactctctggttgaggcttctggttgaggctgagaaactggtttatactagttctacttaaatgtggccccatatatagtcattgtttataagataccagaatcgagtacggagtagtagttccgctataaacatgtgaatcgccaaattattcaaattcttgttattcgaatgcattcaggctcacagtttctcttggcgcccaggtcttcgcggggtagggagtatatacatgttcttgagacatgttttattctatgtacatcgaggtagtataactatagaggttcccaagtctccccttttcaccgatccaacactaatcccccagctggattactctctttctttgtccaaagtttggcccccaaaggtgagaaaataaaaataggaacacagccttgtctagcctccgaggtgtgttggctactcccataccgccctatataccgcctgcctaggaagcatggttggtgtgtttattttgtttgaatggggttttgaaccggcagaaccggcagaatcttaaaagcggtatgttgtaccgaccagccccattaaactgccagttttcgcgcgacccagtgggagggttgataaagattctgaagcatgctgttagggtcctggatgtagccgcaagccttccgagctccacgcttctcgaggcggaagcccatatgctccacgaggctcagcacttcttcctcggataactccacattgcccggctcgccaattccagccccctcgtattcggagccacttcctctacgggagtggccgtcatcgaaatgccataataatgggcccacgttgatccagagcccatttggtttgaggctatgtcggatcgtctcgatgtaccgaatgaggtttggcgccgtgtcaatgaagaaaacagtcgttactgcgtcgaacatctcatggctctcgggctgagtatacaatacggtaaaatccgctgcggtcatggacattgtacctaagtggtgaccagcactggcagcctcctgcatggcgaacccggggtgcacctcagggatcataacttgctggagttgctgtgctcgtgattggagattggaaaaatgcaatgcaaaaggatgaagcgcgtgctttgccgccccgttagtatggttcagaacccagctactggctagcagctggtggtaggagatctcattcccctcggcatcatagcctgccatgcagatctcaaaaactagacggcccaggccagcgccagggactaaaacacggatttgctcaccgctatcacgccgtgtctggaactcctcgtgaagatcctgaagaacggggtcatagcagacttccctctcgggtcgtccttcgaggctccagtcccgatagaactggcgtatcgtggaatgcgctttgttgacatctgatgaggttgctacgtcatgccaatattgagtagggtccgttttgtcgggatttgctgaaagaccgaatgagtgaagacccaccgccagaattgcatcggcgatatcggcgttggtatcaatggcatcgtccactttattgaagttatcaaggatggagaacggaggctccgagagcatctgccagtgtgccgagggcagggcatagaaagcttgccgtcgacgatgggtagtattcatatgcgcatttcgccgatattgtctgtggatatattagccagaactttgcgattgtatgttaattggttgtttcgaggcagaaaatattgtaatcaactgtccatccacgtacctgaatgagtcgaatgcagcaaatagcaccctacgctcttcaggatcagcgaaagggttgaagtcacctccccaaccgttctcctcctccccggtctccggcttttgatgctcggccatgcagaggttgtcagcctagctccacactaaaggtgctggtcaatgctacaggttcacccgtcccatgagtgaactgatagtgacgaaggaggaacaattgttgaaaaaacgagaagagtatatggaggggcagacaaaacaagtgggaatccctcctattgggtaaatttatttaccgctctactctccgccttctcatctgggaacagaaacatcataggatgggtgtatacctgtaacaaatataatatagaaatatatatatgcatctgttcatccattagacgttagggatccgatgatccttcatctgcctatatttgactgttgaaaaagagacaaaaggaggacaagtggttttctgccggcataataccttaagggaatgaaccaatagtggctgttatggcgcaccgtattgtagagcggggattcgatatcgaattcccgactttcaacaacttgtctaaataccattctcgccacagatttcttcctttacaccgagaatcggtgaacacaaatatggcgaccgaagccccaccagccgttccttcggcagagctagccactcccgccgtcaggcctcaagagctctcattcagcttgcccagagctttgcatacgacggcacatgttcatttgaccttcttgggtaattgtgccacaatattcctggctacctcatcaccaggcgactcgggcggttctatcaaacccatgggaagtttcgtctatgcgatgcccgatgtaagtaccttatctgccaagtgtggaatccttgccatattcaaggaaagacaatgtcattttctcatgtcataccatatggaggaatggccttattgtttggcatagccccgaaatggggctcctctgttcagtcggagtgggatatgctgcaatatgccgcgcaccccaacctcaagctcccattggcagaggagttgtcaggctaaacggatatccccgaacctgataattcatattgctgatatttccaatataattacttgctatcaggatttggctgacatctatacagcgcacttcgcccaagtcgacaatatcaacaacgctctacacatcaccatctagcatcgaatatacaacgcgcatatccaagatcctggctcgaagattttcgatgccagtctatgttggttgcagtattgacccacatagcatgggattggaagtcgcggaggaaatcgaagggctgaccaagatcgtcgacgtgatcacggagaaatgggaagagcacaaacaggagaaggctgggaatgctaaataaacgtttgaaaaaatgcaaatttattccaatcgacggtcagaaaaaagtacctaattggatctatcactggcctgattactcaacctaacttaccaccgatctcaaccagatcccaacactagccttcaacagtctccgccgggaagcggtcaccaggtcaccggcaaggaaagtcgaaagggatttatagttgtgtcgggttcatggagatcctaccaaccataagtagatgcccttactcgaggacataccacagtttccatgtggatgatacgttcagccgtaatagaaaatcaacttgtatctcagacgcaaatataactaagcttaattgccgcatgtgagacatcacatgcacgttgattccacttttcaccaggataccaggtatctatgttgtgcttatcactattgcatccaatgtggacattcttcaaactccacagtggcatatcgacacttgcataacttcatattccattcctaacaatcgcatcatcagacccacaatgaacgaagaataggaaaaacaaaattctccccacaatacaagcgaaaaaaaacccaaacccaaaaaagcttcgaacctccatctcctcggtaaacaacccgaaacatctccggtccgtcgaggaaaccccccatttggtctgtgacacccgccgactagcacacggaagacatcgggagtctcgggttgacaaccgtgacagttggcaagcagagcaaatcggaatgactcggttaacgggtgtttcatctcgatcgttgtcccgctgtggggcgttgagccgtgggcacacagaggtgaacatattatttgctccaacgtacgttgtatcttgatctggattgcccattctcaatgcccccagagtcaagtggacatcgcctggtttatcccagacacagagtcgtatctgccctgccccttgaaagtgggggcaaaggtcaaagcaatgtcacactatggctcttttcccctcggagccggccgacggtgtcttttatcgtatacaattggacccgtggacggctcggtagcggctgctgatagtcgcgtaccatgatatgtatgtcgaaagtataaaattagaatgggggccgattgcccgtcgcagatatggaagtgttccaattggagccctcgcaccacaccgcaagttccgaaacctaagcagggcaccaggccctcgtgtctagcttcaaactagcaacccaacaaagcatcaaaatatatttctgcagatatcattggggaggggcgcggtcaatgcacttacacgtgccattgcagactcccctgcataagatatggatattagttccggcagaaaacctatttggttagggttaagcgtttagctgcaagacgcatgtcggtccttgccaagttggggtcatgataggcggttatttgtttctttttttaaattgaaaacattcaaattaagttcgtcggcaaagtacgccgtactgtcacgggttgggggtctcggggcgagttccttggaagtacggagtagagtgctttctaaccgagggggtgtgcggggaaaaagggcttgggatggcgacattggaagtggatgggctcatgggtggcactatacctgtgctgattctagtcaaatcatgttgactggcaataccacccggtgagtcgggggaatcattaccctcgcttgatgagccgaccgggaaagttccgagggcgcatccgtgacctggcaatgtttaacgaaagactcccaaagtacggagtatccaagcggctgatgctgtctgtgccccacgatctttgctgtttttgctgtttttgctcttttggcccttttctttcttttcccctctgcacatcattcacagtccactctatccaccggtaaagcccaatgacgtgcaaccaaggcaccagtgggattgcgctggagatattctccattctcggtagtcgacccagattggagggaaacccggactagagatggcttggcgattcaagttgggctatcttgggacatggagtgacagagtcgagccctaacccatgtacccgacgccgtaggagatatacaaccctggacagcgttcggttaaagctcgggaaaccagccaaagccacagccaaaccttggacggccaagtcgaaagctaaaaagcaaaagaaaaagagaaattcgggccaacacatccgattccatgtggtcccggtgcacttccgaagtcgatcatcagggcttgtgcagagggacgagatcttcgtggacgtatcctctttttcgccctcgtttgctatatactcttatattagcattactagtccgaagtatactagattaattgtctatgcactctgcactaaatggaaatgggagttcatggaaatacaactactgactcgtccatcccaatccactgccacctccactgccgatctcgggatcacttgcttgtcttaccagtctaagatgtacatctgcgctatagagaagaggaaatagtcaagtctcggctcagatccgctgaagattccttaaccatatatgcgacggagtacggaagatcgtaatactctgcgtcgatctatagttcgttttttattattttctgtgcatttcccttttcttttctttttttcccttgagttgatttgacattccccaatctccctttcttcacaggattctttgatcttcatctgtcccaacctcggcatttacatactctattgtgccgggctttaggctgcaaatcttttctggctaatttctgaatttcctattttccttttctatttcgatctcgacaatggctttgcagtctgcattcgaataacacctttttaaggaaatcggaatcttgacgaaactgtggcgatagtccttatcttacgcgattctcaccacgtggacttttaatttgtttctcccagatttctctatttgactagagaaatacatcccaacatgcagccctctcattttcgtggtaatcagggctacgaactcccatccgtgcagtcggtgacgtcgggcgcattcccggctcccgcgctgctctccgctccgccgagcaggcctgacagcgggatgcgaatgtctcatctactgcagccgatgcccccagcggcgccggcgacatccccgtaccagcgttactatgactccgcctcgggctccccgggcgaaaccacgcttcccgatgcgccttcaatgggctcggggctgtaccaaaccagcccggggcatagccaacagaccgccgcgcagctacagcagaagcgcgcatatcgccagcgtagaaaagaccccagctgcgatgcgtgtcgcgagcgtaaggtcaaatgcgacgcctcggagtcgtccagttgcaccgaatgtaacaatcgcagggtccgctgtcagtttaccaaagagacgaaccgccgcatgtcgtccatcaagcaagtccaggatctggagaagcagttgcaaactacaaaacagcaattacagcacctgcagacgggcatgatgcggccggatcgcatggtcgatgttgacgagggtgtctcgcagatgattaagttgcctgagattgaatatcgaccggtgcgccgttcgagggcgcccatcccgcaggatttctccgacgtgcggtctaatctccgcgattacggccagggcatcatgaaggtgcccacgccgtatcgccaacagggtgcggagtcattggtgactaggaatgcgccgatcctaccggcgaagaagatagcagatcaactactggcccagtatttcagttgcattcactcggtacttccagtgctccattggcctatatttatcgcagagtatgaaaaggtttatcggatggggtcgttgttgggtgtctcgaatgaatgggcggcggtgctgtttggtgtgtttgcctgcggtgtcatccacacaaacgacgaggatcgagaggagcaagggaagaagtacgtacgcacatcctgtgggattattgatgtctggcacgacgtcttcaatttggatcgtgctcgcgcggcgctgctagcaagcatctttctctacgaggtcaattcgaagtcggctagttgggtgtggattggctcggcggtgcgcgtggctcaagagattggactgcacatcgactccggaccgtggcctgccgtcgaaggggagatgcggaagcgtgtttggtgggggttatacgcttgggaccgaatacttgcgctggaaatggggaagccagtattgatcaacgatcaggattgtgatatcgatctcccatgtcccgtggacgagcagtacatcacagaaggaggcaagatcccagacaaccagcaaaccacgcctttgctagctacgattcacgtcgtccggtccatcggccaactcacacgcaccctacgttcagcaaccatcagccccgccaccctcgagaccttcgaactccacttcaacacctgccttgcaacattcccctctcaattccaccctaagaccgacgaagacctcgaccctcgctctctcgccccggtaatctacctccaaaacgcccgcctcctcctccaccgccacaacatctcccccttctgtccagacatcgtccgcacctccgcactagactactgcgtttcgacagccctcgacacagccaacattctctcccgctgtatgcgcaactactcagtacgcccaagaccaccatgcatctacgacccccactcgcacttcgcctctaacgccagcgccctcctctgcacacacgtctggcgctgcacgctcttcctcctcttccgcggtgaatacggcggcgccctcgtatgcgtgaaagcgctctcagcagtcggcgacgtgcgcactgtcaacgcagcctgcgggcgctatatctccttcttcatgcgcaaattactcggctgcatcgccaattccagtgcctcagtccctgatctcgaccgcaacgaagaaatgatggcgtatgtctcgggcgatatgcaagggaccagcgacggcagctggatatggcacgggtccgagacggggtctcaattggaggggatgggggccccgatgcctacaacctcctcgaactatcggacggagatggatacggatacagattgggaggggtggacgtggatcgagcagtctataggcgttctctttcaggaacagaaacggcagcaggaggagaattacaaggcttctcttgggtcggattcggcttctggtaggtcgagttcggcgcattcacgaatgacgattgctagcatcatttgaacgcatctcactacatcgctccatcggcgtgtatgtgtatggctctagacaagtctagagctcgaaactttatatgggcactgtcacttgcctttatatcctccttgcaaatattgcattgccgatacccatgcccaagtacttgtttacagcctttgttttttatgtatatatctcacgaacggatcggatttcgaccgtttcagtttgcatttgcatgtcttttacttattagcttgatgaaacactgcgcctcaacatatcgacgaagcctgcgacatccaagtctactttgcttgtcggtgaccttgctctttatctcgatgattggattcaacacactatcttcaggaaagctatatacccaatgaccgaatatatttccttttcgaatttctatttcaacttctgtgttctttctctcttcttgtgtcaggtatctgacggtagactgcatattcaggctagtttaacatgggctggtgtattggactgggtgctgtgatacatagagtactgtaatgtactcgagttctttcaccaatctggtgtggacgagtgagaaagaggatcaggctttctcaagtaatattgtgcataggtgcagagataccacgcaataatagagacaaatatgttaagaatgaatttccaaaaaagagggtgacaactcccatgccagtaccctatgcctaggccacgccagccgacataggttggaatgcatatgtttataatcgcggacccagcagatcgaacgccggcagccggagctacctgcatgtttaatccgctaagccactgggggggagggtcgaagaacaagtgttcgtctttaatttataggaaggaacctggggaaacatgcttccgaaaagggaaggtgggtctgtcacatgttgatgcctgaatatgtatccgtttctgcctgattatcatgatacccattgctctttccgaatacattcgaaatgagaaggaaagagcatttcaatggcagctgaggcattttttactgagtgatcgaccccatagaggatcaagtgcagcccgtggggttatggctaatatatacagaatcattatcaacctgtgtaagctcacccaggtgtgaagttactcatgcaaaaatccgtgtctgaaattgttagattgaactatataaggctagaaggcaaatgatgaccttgcggaagaaaagaatctatataagactgaatctatcaacgactgtacaaccacaccccagctgggcaactagctgcttatttccttactcaatagtaagtcacctcgtctccatacaaagtggatccagtgccaggctgcttcacgataccagcttccaccaactcattgatcaggttgaagaccatcagatcacagccgtgaggtgcgaggaaatccaccgcgacaggcagatattcctgcttcagggtaatggtggagttgtacagcgcttggccgactaaattataattgtcattagttatacagtccttgttcaagtaatatttgggttagcatacttggaacgaccatatcgggcacaccagcgaagttggcgatacgagatgtaccgaatcctgccgggacacctggcatgctatatgatacaatggattagcaaacagtccatcaaatatcctagagtgtcagaaaggacaagcacatacctccggtaaacattgcggtaggttggtgtcgcttccgctccaatgtaaagaatcaggctgtctgagcaagtctcctcgtcgaatacctgggcagttgtgttccaccaggtggtgaatatgttcttgtgctcaatttcggtctccagttgcgagtccgggtatccaagtccccaattccaacgggacagaggcacggggttgataaagggcttgcgacctccattggcagccgcgtagtctgcatacagcggtgcgccaatgaggggatactgctgcttcgaaatgaggatagggtaagtgagaggcaacatggtgtcgagggtcgcattggcggcaacagtcgaaggcttagtggattcccagagagcatcgtaatcaaatgcagaaacattcgcaccacccaagaaggacgacagcttgtcgacgaaatcaatcaaaaggccctcagctagggtcgatgcattagttgggaactggatcgtcttgatagactttgggtacttggtgtaggacttcaggcctgcatccttgtacatcacctccgcagcagtgcgccacagctgcacatctcttgtcaagaatccggcggtgtccaaaagcggggacatgggcataacattatccaaggagaccaagttccacgagggtctgttgccgaagcatccattcacctgtgaagggttgcgaattgagcctccggtatcacttccaattgccaaatccaaccagtcataagatccaataccggaaccaggaccggacgaagatgagctaggatcttggtatccgtcaccgcgggcgttgaagggggagtggtagtcgacccaatcatcagtggcgctctcaccgttggcaaactgactggtcttcatctttccgacgatgatggcgcccgcatcaatgagggattgaactgcagggccagtagcgttagcggctgggtacgtttcatagtaagcgcggttgccacagccggttttgacgcccttgatatcataaatatctttaacacccagacgaacctatgagtggaagatagtcagtattgcattctcttgcataatagacgagtggaatacatacaccagccaaaggcttatcggctgtcttggtataatacagccgcgaaggaacaccaatggtcaacgacgcatagccctgcaagcttgccggcaaaacatcatatgtattatcaccaacagagaccaatccctgggtgaaagagcccataacatcggaatacaaccgataagcttcaaaaacggctccactggatggatccaagaaatatggaccagcaggcaggggcgatgaagaggtcaatgtctttgatttcttggtatcatatgcagatgcataccccaagattttagggccccacgaggaatgggttgacacattctccgagggacgcttggaggtaccgttatactggacgtagatgttgtcgaggaagccagtgttgaagacatcgtcagcagactcgtagctgcttaccaaggaatcaaggatcgagcttgtcagcttcacggcatcgctccgaatgaccgtcagaggctgcaagccattgagtttgctgaacacgtgcgaatcggctttcagggtagctactactgtaggaggaatataatagttgtttccattgagctccacggtctgacccttcgaggtgattgtcgcgatggcggtggtggaaagtgacagcagggccgacaacagagccggtagcccataggaactaggaggagcgaccatgatgatcagctaaagattgatagtcttcaaaaggtacttttatcaaaagccgggacattatctgccatatatatacgttccactaccgcttattatttgtctcagttgttgcattgctatcgaggacttccagtgataaggatctagcgaaaaggtgaccaatttagggtaccggactttactggatcaaaatggactagccaggagattaattctcttagtacaatatacatctcttatctttcccagagctatttccgcaattcactgataagtcgagtcacagttggaggtttcatagtcgccattggctcggggaaacaagcttaccccaataagatccacacccacgttttcgtggctagtatgtagcattttgtgaattttgtacctttcgtaccttttgtaccttttgcatactgatgccatatgaaagatacccgatcggaaactccatgatcgagggagaggttatgattgactgggcgtaccaaaccctcttggcacgatcacgctacaacttttgcgttcgggaatccgatcgtatccggtgctatctatctacctgcctgttttgcaggcagatccagccacaatcatagctcttagtcttctagaaaccgattgtgacattcgatgggggcatgggctatcaggcattagtattttgctagcgttccttagttcaggaacaccctcctttcagtacaaacaaccccgcgtctaaatattctgccgcccctaactgaaagttgaattaccgccttcctaatctgttgcgactatagattctgtatagattctcacttctatcttcaaaaaccctgcattttaatcgcaatgttttacctaattcctagaaagttaggtcatatgaccaagttttctatcacttggatgctagaatcatagctttttaatgtcccatcatatgaccacgtccacctttctctatcattatggcattcaaaacatatactagatacggtcactcgcgtccttcggagctatttcgctcacgcgctggcaaccgagatgtcaaaaagagagagggggaagaatagaagatacgtggaggggaggaaaataaatgacgtatggagagttatttactacgacgtggcatcgcactaactggaggcctaaggtcaccgagattcctagtattttcttgaatccttagactccatctattctatcacaaaaatcgcgcatccctcgatgagactactaacttagcaaggtcaaaggatcaagctaatgccatggtaacactaagtcacgtagatcgacggcccgatccatacctgagcgatgatacaccaaccctggatctctacggaagagtggagagtggattaagttccccactgagactctggcgatgtccaggtacatttctccatgcactagcagggatgcagggtatctattttgggaataggcagatgcatttatcgcagtttttcgaggaatcagagaagtttataagaatcgaagatccgcactagcacccgtagccttcgaagcgtccaacccagtctatcaaactcgttctctccgatcgataggttattctctcagaatgatggcactcgtgacatccctggatacacttatgtgctcgatcagcactttcatcctcgactcactgcatgctgcgcctttccaaactttcgccatcttcctcctccttcagttccttctcgccccgaccgtcatagccttggtgtgcagatggtgcggcctagcacctggcacagacaacgagtcgcaaaggacttgcccaacgtgcgacggaagcggggttgttgatgtgacgcaagacaaatcatcacagaccgaagcttactgaattttgagattcaaatcttctattcttgagtcaagcgaaatttagcgaaaattagacgcagccaatctagacgattcatccacaaggacaagactgatctattgtatcaatacattcccaactcgaaatatgctttctgtttatcgcgctttctagtcatgttgagggctgtcattcatgtctttatccactgctctgagaaacaggatatataacgaatttccttgtcttttttgtttcaaacgtaaagccaggccctctcgtatctatgtgcgctttctttcctgcatacttcccgttatgaaattgagtaagtattttcggatcatgggcagctacttcggtattcccttttctattcttgaatcataggtcctggcgggtctttacataagaaccaagtgagagtaatagttaaatatggccacgggtacttgcataccgttagatcagaatttattttgtctgaatagaatcgctgtgttgatttgttgataagcctcggccacgcataccacacggagcagtagtgaattcaggtttccctagatgagcctccgagaggggtcacagattttagctgcggttctacatccaatcctccttgaactcactcattgatcaattgtctcttccaaggtgaatccaacttcttgaccgtcgttatttgtattttgcttgcctgtcctgcatctctactactgccatccgttagttgcgttggataatcgttggtatactggctactccatacgaggctgtttggactacctctagacagaccctactccggactaatgcgactgacgtctcatggctatggaaggtagtagcagcctgcttttcagcggtacagctaatcgggtgagttaggcatcaagagatgtgagcttgacttgagaatcgggggtctctgactatagttggagtagatatatgatgctggctgtggtagtcggtttccttccccatgagttgcgaatcaatgctacagcatctactgttactgcatttgtgtttgttggtacatcttatgatgtatccgccttgattgccttcgcccagcgccatcaaacgatgttcctcctccactcaatcttcatgtaggtatcaatgaaagcggcgtctctcgatcggccacgggctaacaattgcagcccatactcgacgatgaatatgctcgcgctcctgaatatcctgttccacatccacgggcgaagcctgcagacgaataccttgcagattgtaaacatctgcctacccactgctttctcggcgtgttacgctcttgcgggggtcttgatataccgagagtacggatttcaccgagtggaggaagacatgccgctactcactgacgaagagatgcaacgtcgccagttgcttcgtttgttaggggaacggaataccagcgcaccatcgcccgatcttgtgcgaaacacttatcgctttgatttaccggatgaaacagcacaaaaggactggagtcgtttgactccttgaagtatgctatagcgtaggaaatatcggatgtatatgaaaagaaatgaatgtgaaatgtgaatgtgatcgaataatgtattatttcttgcatgtgtagctgcacaatgtgtacaatccgatgtagaaacccccggtcgatcacttggacctcggctttttttccgccggtcgaccgcatttaaacgtccaggaaaccatcatccctgaaatccaccgggacatttaacctcttgtcattgatctctcctgaaaacaaatatgtcaaaacgcgtgacacttttcgacccgcccgcgcaggatcattccaaagctctcatcgagaatgtactcgatctaacgccagtggcggacctcggcccagtatggcatccctcaatctttcgcgaatggtcatattctaacagagaactctcggtctaggatgtcttcaccaatacccgcccgctatggcacccccccggagctcggggcatctacggcggtgccgcgattgcgcagtccctatcagcagccatgttgaccgtccccgccgactacgccgtccacagcatgcactgctactttgtacttgccggagactccgagatcccaattctataccatgtcgagcgggtacgcgatgggaggagctttgtgacccgaaccgtgcaggcgcggcaacgggggcgaccgatcttcaccaccacgctgagcttcagccgggtcggcagcggtggcaagaagaccgttcaccacgccgtaccgaagccaaacgtcccactgccagaagaggccgagccgggcagtttggaagctctcagccatgcaggcagcggtccgtttgaatcaaggaaagcgggaattttgaaccgtacgtctttcggaagcggcatgctgtgcgcgttgtactaatggatgtcgaaattaaataggcacatcccccaacccagaagataagaaggtccggcgacacattcgcgcccgcggcgcaatctccgaacagggtggttaccaagcacacctgtcggcgctggcctatatcaccgacagctatttcatcggtaccatctccctcgttcacgatattccgcgattttcctctccggccgagctcgagaagcttttgaacgcacttaagaacccgtctgatctcgacgatgaggatatcacgcgagctctgaaggagttgaaagaagaggaggctgcggaattgcgccgtcgtttggagggggctttgaacagggccacgaatggcataaaggaggtagatcacaaggaggttggaatgatggtcagcctggaccactcaatttacttccacaatccccgtgcattccgtgccgatgagtggatgttgacggagatggagagtccgtgggctggcgaaggacgaggcttggcaattcagcagatctggtctaaggatggactgcttattgctacttgcatgcaagaggtatgtattcgtttttctattctggagcttagtgctaactcgatcatagggtgttgtgcgattaaagcaagacgacccgccaaagtcgaagatttaagagcttgtgctataccctaccttgaaggagttctctcctatcattttccattcttttacatatcttcacttatagatttgggcttcgtcccctcgactttctctggttttcttgaattgaagctggacattcttagttatagcttcaccgcacgagcatattataattcaatagaacaattgtctcttgtcttcgccgaattacccaaacagtctccctaattaacaaacccaaaacatttgaacgcaagaaacgcgaaagtagaaaacacacaaaacaacttttgcgtgaaacaaaaagccgacccaattttgatcttccagagccaaaatgcgaaacagaaaacaaagatatcctatatagtacaaacctcacctttctcactttcctgattatttcccgtcttttcaccctcaacccgtttgcgatagtattccaaaaccttagcgccccaaacatctctccccttatactcacccacataatcaggccaacttttcatctccttggccagattatccagctcagccattggcagctcatccaacggcgtgagatacgtcttgacaccaaagacgatcgcccccgtgcgcggcagacgacggaaagtctgtctctcgcgacggatcaggatatctgatggcgatgggctgctcagctttttctcgcagagggagttgggccgatagaggatgtcggtcaggttctcgtttggctccttgacttctacaaagtaatttgagcgttccattggagatgttggggttaagcgggcgaggaatctggggagtagggtcagtttcttgtttcttgtttctctgtatggccgtcccctctgatctgatttgaggttacttacttgctgacggagttggcgacttgttggtgccatagtggaacagggccatgcagctgagagatggtccagccaattctctgatttactgtccaccccgttgggaagaggctggcgctagctgccctgtgttggtgttagggttggtaaattgagtattatgcggatttgaacatacaggtagaattccccttcctcgttcatgatcagaatactgagatcctccatcgtaagacgcacagcggcctcgagtgcctcggttgatccctcgttggggtcgcgcccgctgacagtaaatttatcgcctgtcatgcgattatcgacgacctttcggccattttgaattgagatttcgaacatatttgggaatctctcgcagagaaagtccgaaacttcctccaatgcctcttggcacggttcaattgactcgggcagacagcgaatgacttcttctcttttctcatgaagcaattgggtccggacccggtgttcgtccatatagttcttatccagggtgagccaattctgggcgtcgagtttgcgaatgtccatcattacacggtatcgctctctgcctttgatgggctgcgctgggtatggtgccatacgcttgacgtcggattggttggagacatttttggagcaatgtttccctttcaatttttgtgatagccactggagcaattgtctttggtgtctcactgcgaaaagaaagacgaagattggaatcgcaactagtgagaaggtggccatactttttctcattaaggctccacgtatagatcgaactgttttcttctggagataaaactaatcaagaacgctcaatgtcaaaggaaggcaaagcgaaatagaaaataaggtgaatatcatagactatgaccaagactagaatatataaatataatttcaagacgggctatgaagtcaccatcggaaacaggcaacaatagaagatcaccagactataattctaagtcagcttcactagtcttagccaaaaaaaaaggttagctcccaggtatggcagctgcattccacatgccccattcagcgaagttgtgcctgcggaactgctgtgatacgcccagggattccccgcaaaaaaaaagtcagagttcaccggggagtactgccagccacatgatctcaggccttttttgaaaatcatgatatttgtctgatttttcaaaagtacatcagggctgtgcataaacaatcagctctgagtgttgccggagtggggatgattacaaccaaaccatctctcactggtcgatgatatctcccttaccagtcggacaagagcgcttggagacgactcggcccatagtttctcggaccaactccctagctagggcccctacgatctagacacagagtgccgtctttaacttcaaacaatcgtcaagctcgtataccgcccgtgcgcctcatgaaccagccgcccagggcttgccgactcggaagaaaaaactagtctcgcacgaaagaatttactatgtaggctccggatatcatcggagaggcaatgtccaggagttgatttgaaccgcgtaaggcgcttgccagctaatgtttgtgtccgtacccaaactccgagagtaccggcatgtttggtctggggtcacgcaggtccggccccagctattaataatttgccgtcttggaagagtctacggagtacggagtacggagtactagcatattgggtctgagtggcccggggatgagccggggattcgttccagttcaggtgcacattacctccgagctaggtagatgggcacatggagtttagtctgacgtatcatcgtcatgcctctcgtgggtggagtggatatcaaggggctttttttgcctttcttctccaacgggtccggactctttcgtcacatccgccccgatttaaagattctaggattactggacctcggttttccttggcttcaggttggaagaaagccattgcatcgaatcagacaccgagaataactacactaacacacactaacacactaacactaaaaataaacacaataaaagaagactaaaacagaattttcaagtaaatgctgtcgcaccatgccacaatttaccaacatacccttttaagaggctccacagactccatctggggttcccgctgcaaccgcacatcccccctttcgcgcaaagcgcgtttgccgatattattcttatagtttgggccggaccctcctacaggagtacgcaagttcgttccatttcccgggtctcggctttgattcttgacatgaagattttcctattagctttttattttcgccttctccgtcatagcttcgaagccctaatgcccctgtcgctattccgacaggctattataaccatgattggatcttcaaagcataaatatttgccaccgcttatgatcttcgcaacttgtttgcgcatttcattcctaactacctcgtagacgagtgcgaaatgctgttcatagtattacatgcctcgtactccgcatataatccttttgtttgttacggagtactccgtactccgtacataaactagttcctaatccagtacgtccacacgggccaatcaatgcctccagctagacttgatctaagacctgtgtagagtctggaccgggcccagtctggacctcgactgcatcttccaatcctggaatccttgaaccgttcatcctggatatggatcacagcaattaaagtacaaaccaatgcaaggcgacgggggatatgacaatcgccccgtcaggtcggcaaagccgatttcctttcttttttcttctctcacgcacagacgtttagatcacctgccgttgttctcgctggttgggttgtatattccaaggtggatctcccgtctacccgggtgcctttattttttgcattagtagcgctccagccgagaaaaacatatatttagttaggacttgtctttgccccttttcgagctattacgacttctttgtgcaagcttatgaaataatgatcaatcataagtaaccacggagtacggagtacggagtagaacacggagtgtgccaagcccaccaacacggaattgggcgctaaacccaaaatggaaaacaactaaaaagggaaattcgaaggtccggattacaattatacatgtagaatttgatcaactagagcttcgataaaggcgcagtttgtatcttatttcttactccgagctcgtgtgataaggatctagactgaagcgtagacttgccatggaatttgtcaagccatcttgtggcactgcaatgaatccacgttttcgcaccattctcgcggatagatgggtgacattggtgtcgtcaatagatgcctatcctcgactaaaggaaaatatcaatgtacttctgccaatgacaagttatcgagaaccgtaattagtcaaaaatgaaatcaatctgacctgcgtgactgccatacctccctattcggtccacgacaatggacatttgtccagacttaaaagtagagatacattgcataggaccagtgacgaggactttgaataactggctgatgtctcgttgacctgcaggtttccaaaacaggaccatcgcaggtcaggatgctgagtagacctagcgtcatcttcacttggcagacagtcttatgcttctcaatcgagcaatagcccataaataagtctcaatgagggtgaacgcaatcaggataactgcaaagcccgtgacaatatagtccaatagcatctttagctagcactgtaagtagagaagaaggtagaaaggctttggagataggtctaaggctttctttcaaaagaggaaatgtacacatatacgtataaaaagttgctcagagaacaaatggagttccaaattcatctcggtgtattataatctgtgactatcttcttggtaagccgattcatcttccaatgggattaagagagaaaaagagaggttcggaacttttgtcccgagtcagatgaaaacttacgttctcattcaatcgccctaacaaagacaaaagtacttgtttagtggggtgatatctgtccaatctcatgtttgacacaaatcctacaacactcttagaagcacaatctaccctagattctattgcacaactctagcaaaacctctattctacatagagtacagatattcagtgtatcgcttgagatagaagatgtttccacagagctgaagcgagaagataaaagcctgaggatggatttccgagctagggttacatatcacggcgttgaaagtgctgatcctcctgctacaagtccagtcacttttcacaccagtatctttcacgatgacaacttacaggttgtattatcgtcgtcgtgatgaagatagactgtgggaatactgttgaccttgcaacatgtgtctactatttgtggacgagaaagatgtttaagttaatgttgccgctagtgaagactttgtcagtctccgacctggcgaaagcttgattgtgatagtttagctcgatgatgacatctggacttttcctagtgatctatagctaggggatgtattccggtttgcgttcaatggtaccacggtagattggtgggattggggtagcaagaaccagacccatactcagacggtggtgaccacgagtacttacgtttccagcagagtcattgacccagctgataataatggcaagcctgaaatagtggtgcctccttccaaccaggtcgagtttacttttgccgtttagatgtattatatctacaaatctaggcagaaggttaccaaatttgcatgaatcaacttggccatcaaattaagtggttcgtacaggacaaaagataagatgtatgacactgtcatctgacataaattaagccagccacctgtgataggtggcgggtgaacaaaaagtgtaccgccaaggttgttgttcaccaggatgggcgttgtgcaaattagttctcgctgaatgttggtcagttcatcgatatctcctatgttgccagatggtcgaagcttgacctgccctaaattggcctgacaaaattcattcatatattttacgaaccgcttctgaacacctgggtttaatgtaagcgggtagagatcagtcataagagggaaaatacctatcgtacctttgggtacctttttgtggttagttgaaacgagctcgggagctttgacaccgctgaataggttgatgctcacctctaacacctgcttcctatcagttggaatgccttgagtaaattccagacccccttccataacggagattaggtcctcaatcattctttgggccataacttgatcatttttcaatgcgccactatcaaagccgggcagattcccaaagagtcatggtgtaccgtcgttgatgaagatgtcaaagtgtggagatatcaaaaggcgaaggtgtcaaaaggtgaagctgtcgtggttgaattcgaaggtttctcgaatagctatccttaattggtatgggaatatgtatatggctttgtttttgacgaatctggatgtatctttcgggcgtattcgagatatctctagggctatatacctagctaatacctatcaagcaccatgccatgctagcattgacttttgtggctattctctttgtattgtttcaggtctgctgcgagcacgcaattctacctaagccagttatcattaagtgaagacggacttcttatcgagatattagaaggctaattacttctaaggttgaggaggctactagaagattaagtcgttacccaaccttttaggtgtcggatcttgggaggtgtaagctgacatcactatggataaattttattagaccaagcaaaaacctttaagaaacatccttcaccctcaaattcagataatacgtttaaatatcagagatgccattttctttcccccgtcgtaaaagagaaccgagccgggatcgagtacatagaaaagtcggaatcatgaggggcgataaagacagttgggaagtcggtctcgaacgatctggggagataaatattctccaaagatatcgcttaagtgaatactggacgctgatcagaagagataacactgggcctccttttatctcacataagcttctctttgtagaggaagacctccgggaaatttttcaagaggagatatctatcaaagagggagccgacttgaacaaagatgccaaagagagacttgatgctttaaatgccagatactggctcttagagcaaaagtgctggcattatcattcctgtctggcagatgggtatcagctaagagcgtttgagctatggcggtcccatcccaaatggtatatgcaccgcgtgcttgttgaagattgtgctagccggcatggctgtgctcgtggatgtgggtgttgtcttagccgcaatattgatcccacgcgccgtcttggagttggacattgtacttttgaatgcggatgttatcgcagagctcgaggctttgacgtttctgaagaagacaaaaaattgctgaaagaacagtgccgcgaagaaataagcaaacttactaagcaccggatcacgcgagtcgccatataggggcttgtcggtgatagctatgagagcccgtttgatatgattgatgcaccaccaagctacgagcagattgcgaaagacaaggcttccacaaaaaagaaggataagactcgctgactggcttcaatcatggatattgctgcatcttgctcactatactgttgctgtgtacctacccgattaagctcttacatcacattgcaggctcataccttccctacaagccattgcttcccccgtagtctacaaaacaatcttgtagcacacgtaagaaattcaccttcacatcattttgctacataatagctatcttcaagatgactctgttaagccttttgttattgtcttgtttgactctttccttcgccggtaagtttgatctcttttcgggcgtctttccaggcgtcttttcagctgtctcttcagctgtcttttttggccactttctgacatttattttttagctcccgtcccgctgcgcccccgggacagcgaggagagccttgccatccttgaatgacggccaccgcgcgtgacgtcctgtggctcgtcgtggccttcctcctggccgtaaaggccatcaacttcctgttctggtgggccaagcgggaggtgaaactgtatgtcaattggtcgcaccgtaggctgtagaaacaatatgctgaccgttgatgtagctagcgactcaagaaggaggagcagcccaagaatgaatgagaaggggggggnnnnnnnnnnnnnnnnnnnnnnnnnnnnnnnnnnnnnnnnnnnnnnnnnnnnnnnnnnnnnnnnnnnnnnnnnnnnnnnnnnnnnnnnnnnnnnnnnnnnnnnnnnnnnnnnnnnnnnnnnnnnnnnnnnnnnnnnnnnnnnnnnnnnnnnnnnnnnnnnnnnnnnnnnnnnnnnnnnnnnnnnnnnnnnnnnnnnnnnnnnnnnnnnnnnnnnnnnnnggggggggcatgtgaagggaagggagggggggcccccgggggagtggaggtatttatattttttgatattgtatataccaacctggccttgtaaatatgatgcgactacagtgtagtgatgtaaattgatagagggagagagttgtcaattcctaaagggcagaatgcccgactatctagttggtacctgccgtactgggctgatggtcaggtgaccaccatgtccaatacacccccctaggtataatcccgaggaatgcactcatctgttgttatcgtttttttttttttattgggcagaaactatatcatctagtataagttgacacggtgagcgggccgccagaaacggctcccattgcaccaccctcctgccatcctcgaccgcctgcccgtctccgccatagccttgccccttcgggtttggcgccctcatcttgtccccctttggtttagccccgtccctggccgcttttaccgccccggccatctgccatgcatctatataacaccgctcgccctctcccctcaacttgtcgacgcactttcccttctctttccctctctaccccctttctttctcgccctttctcgcccccaccctcgcctgcggattggctttcagcccgatgcactgcccctttcattttaccggagatgccgctctatccgacgctcagctcgttctggtcggcatgggctgccgtgccatccagtcgcccaggagcagaacccctgggatgatccagcccgcagccgcatcgttcggtcttgagtcgatactccctcttccttctttcctaggggagtggcagtgcatcgtgctacgaagctatctaggtcgccttctctgctagagcgctttgctcgttgagcgtcactcatttcaccggcctctatcgcatctgcaaagctctggcatactatcttcgatgccgtaagccccgctccattcgccccatctgaggttacattgcacagcccctattgtcgcagcacgactctccgttgcctcgtcgcgaatcccgtggcgcccagttgtcgtcatcatcggtctctccggtctctccgcatccaatcgatgaattccgaaagcacagcgcagcgatatgggccaatagcaagaatgcctcgcacgcgcctgacctcggtcgacgatacatcatacggccaataccggacctcgactgcggaaaccgcaccatgatcacacctttacctaccaaatagagaacgggccgacgactagtgtagggcatgcatcgcaaaggtcgtccgcaaggaagagtagtggtaacttttgccggtaagctacaacccttggttatgaaactggtgtggtcccgcgtcttagatgcagtggcctggatttcaggagccggtcgggatcttctacgctgtggagaaagcagattccgcctcacgggcgaccgtcgtctataaagagactacagttccacccaaatggcaaaactgtaattcaaaaccccttcaaattctcctctcccctacaccctgccccccatcccctatcccccatcccctatccccgatcccctatcccccatccccagttctctattctctgccagtttccctgttttaggactacccacaaccaccacatctcgaagactgtctccgccaattcttccacacaatatgtcaaacactagttttcgcctggaatcctttcggccatggaatcctttccaggactctcccgatatttgccgctacccaattcctgtatcgatgaccgccaccctccctgtcttcaatcccgtctcaaagagtcaagaaagtcatccctataaacctggccagcatccacttcctgcgcgacccccgttggaggtttgcttgaatggcagtctacattcggacgctcaaacaactcgacacgagccggaggatttgggctgcaccaccttccgtcctcatgctgagactttcgactctgaaggcatatcgcaattgcaagatataccaggcaccaaagaccttgcttctaccacaatgcccgatattaattgtctgggtgctaagcatcgatcccccggttttggatcgtgcgacttggagcctgccgttattactgggcagcaccagcaagctgtcgattccggaaaccctacccagactggagagcttccagaccctgaaacaatcgatcccgcaatcctagacgatcatgtctttccaggtgatgagcagacccaagcaacggaaaatatccccggcatcgcaacatgtccaaacagatgtctcttggagtgctcccactctccgaaccaagatccacctcttgaatccagacgacaaaatgcaaagggaacggctgttcctggtcgtcggtccaaagtaaataaacgtttgagtgctaggaagagatcttcaaaacaaaatgctggtcagtctaataaagggcctccttgtcgcagcagcatttcgtttcttgccgttcgtgctcaattttcggcccttcccgtcgaagaccggctagagttcctgtcctggttgtttgagagtgctttacctcgttgtatttctacgccttcgagcagagataccactgtatcaagatacatcgcaaaccaagattcagacatcacatacgactgtgaccagccaagcccaaatatcgaaccagttgatgctcaacatacttcttgtacgagaaaaggtttaccgtggtccgtggaagaaagatctttattggtgaagctcagggaagaacagaatcttgcttggtcggaggtgacgagacagtttgcacagaaattcgccgggagaagtcaagggtccatacaggtgtactggagcacgacgctcaaaaaagagcggcgatctttggtggctgccacgtagaaaatgccatcctaatcgatacttagaccattccctcgttttctcatgcaccacaaaccacaacgtaaataaattgaggactgtgaattcaacaatgtagttgagtattggtggtccaagtacacagttccacactacggtacagcgcttccggaaactggtgtcactgcaattcgtgccaaattctcggccctttcagtcgaaaactgactgcagttcctatcctagcttttcgagggtgcgtgaactcattgcgcttctacgccctagagcatcgatgctgcttctccatcaagccagcgtgacgacataaccgacggctgtggtcctgcgagcttggacactggggtatttgatgcgcagcatacctcaagaaagggactacggtggtcggtagaggaagatcactctctaatgaagctaagagacgagcaaaacctcgcttggtctgaggtggtcaagcaattttcacgagaattccccaggcagagcgaggggtcaataaaagtgtactggagcacagcaatgaagaaaagacggccatcttaccccattgttctcattgcttgacatagttaatcaatattgagatgctaacgtaattcacccccaagcggcgcaccccatccaacctattgaatttaagtgcatatatttcaaccagaacgccattaaattaattaaactaaaaagaatcatttatctggacacctattgatcttatgcccggttcttccacacccactacactttgatgcagcccgtggacgtggttctacccccggttgagggcttccgcgcgtggggggggggaggtgcttcagatgcttccaccaactcagtaatcaattgagaagcttcctgaacagagaggccttcatcggcaggtatctgcctccgggatctagtactttttgcttttgcttctcgttggcagcgcgtaattcgcttacttctttctcaagaaaagcggcagattgcatggtaatctggcaggcttttaaaacctggttaattgccgaactaagcgggctcggagggcttcttgatctcatccgaagcaatgctttaatagacgaagcttgcttttgtaattgaatgtagtttgatggcgtttttgggtcccaatcgctatcccggcttaggggggggggtaggtgttcgaagacaaatattcagctttgaaagtacccgatcgggtgaaaaaggtattaaaccggctgctgagaagctatttttaatcgtctccgatttaaaagcttcaattcgtgcagaggggtatgcttcgaggaagtcatgtttatcaatatggttgatcctggtccgcatttgcatctcaaccaaccggccgtacgaccgttttaccaccgcaaaacaaccaatatcaagtggttgtaaaaggtgagatgaatgcggtggcatacaaattggtatgatcttgttttgcacacaaatctcatcgaattttggggttaaatggcttccgtggccgtcgagtactaaaagccgatatacccccttcatacgagaagaagtagctggaataaagagcttttgtagccaacgaaggcctatttcatctaacgtccacccatttggactaacttcaaagcgccagtcgccaggaaggccttcaaaccatgattcaaggaagaccttgcctttgaaaataatacacggagggagggcccaccccgctgcatttagacattcaattgtagttacccactcgcgatttccaggttataaaagtgatctccgaccgtagtattcacttcttgttataacccttaccgttgcagttaatcccattgcgaaaccagtctcgtcgaagttataaacatcgtcagggttgattccaaattaaaggatagttttttgaacgagattaaaccactctccaataatcttcggatcttcatacttcgcgcgctcgtaattatagcgtctcgagaatcgggaggaaaggagagggtgccgttttatgaattttgtaacccaattttggccaaccgaaagaactagggtagttccacgctttttgaggagaagatccgccatttctcgtaccatagagtgtcacgattggcacttgcggaagtcgtaccttcccgtttgtttgtacaagaagtcgtactttccttccagggtaagcgaggatagggctatgcccccaaagagtataaagaccccacagatgctttacgtttgttttcttttcttttccttcttcatacttgatatttcagttagaaatgcacttctttatttgaaagaacctggcaggtaacatagagggccgcggggctgctccacaagaatccatagagagaatccatttttcaagtgattcctcttcaatttgtgtcaatttacgtgaattggcgcgagaaatcgcgaggttttgtatcccactaaggcagcggcggagggtagtttcgggtacatcaaaacggcgcgctacttcacgaattgaagagatttcttgattcttaaaagcctggatagctagtaagatcctaccctcttgctctactgaatctttagaggannnnnnnnnnnnnnnnnnnnnnnnnnnnnnnnnnnnnnnnnnnnnnnnnnnnnnnnnnnnnnnnnnnnnnnnnnnnnnnnnnnnnnnnnnnnnnnnnnnnnnnnnnnnnnnnnnnnnnnnnnnnnnnnnnnnnnnnnnnnnnnnnnnnnnnnnnnnnnnnnnnnnnnnnnnnnnnnnnnnnnnnnnnnnnnnnnnnnnnnnnnnnnnnnnnnnnnnnnnnnnnnnnnnnnnnnnnnnnnnnnnnnnnnnnnnnnnnnnnnnnnnnnnnnnnnnnnnnnnnnnnnnnnnnnnnnnnnnnnnnnnnnnnnnnnnnnnnnnnnnnnnnnnnnnnnnnnnnnnnnnnnnnnnnnnnnnnnnnnnnnnnnnnnnnnnnnnnnnnnnnnnnnnnnnnnnnnnnnnnnnnnnnnnnnnnnnnnnnnnnnnnnnnnnnnnnnnnnnnnnnnnnnnnnnnnnnnnnnnnnnnnnnnnnnnnnnnnnnnnnnnnnnnnnnnnnnnnnnnnnnnnnnnnnnnnnnnnnnnnnnnnnnnnnnnnnnnnnnnnnnnnnnnnnnnnnnnnnnnnnnnnnnnnnnnnnnnnnnnnnnnnnnnnnnnnnnnnnnnnnnnnnnnnnnnnnnnnnnnnnnnnnnnnnnnnnnnnnnnnnnnnnnnnnnnnnnnnnnnnnnnnnnnnnnnnnnnnnnnnnnnnnnnnnnnnnnnnnnnnnnnnnnnnnnnnnnnnnnnnnnnnnnnnnnnnnnnnnnnnnnnnnnnnnnnnnnnnnnnnnnnnnnnnnnnnnnnnnnnnnnnnnnnnnnnnnnnnnnnnnnnnnnnnnnnnnnnnnnnnnnnnnnnnnnnnnnnnnnnnnnnnnnnnnnnnnnnnnnnnnnnnnnnnnnnnnnnnnnnnnnnnnnnnnnnnnnnnnnnnnnnnnnnnnnnnnnnnnnnnnnnnnnnnnnnnnnnnnnnnnnnnnnnnnnnnnnnnnnnnnnnnnnnnnnnnnnnnnnnnnnnnnnnnnnnnnnnnnnnnnnnnnnnnnnnnnnnnnnnnnnnnnnnnnnnnnnnnnnnnnnnnnnnnnnnnnnnnnnnnnnnnnnnnnnnnnnnnnnnnnnnnnnnnnnnnnnnnnnnnnnnnnnnnnnnnnnnnnnnnnnnnnnnnnnnnnnnnnnnnnnnnnnnnnnnnnnnnnnnnnnnnnnnnnnnnnnnnnnnnnnnnnnnnnnnnnnnnnnnnnnnnnnnnnnnnnnnnnnnnnnnnnnnnnnnnnnnnnnnnnnnnnnnnnnnnnnnnnnnnnnnnnnnnnnnnnnnnnnnnnnnnnnnnnnnnnnnnnnnnnnnnnnnnnnnnnnnnnnnnnnnnnnnnnnnnnnnnnnnnnnnnnnnnnnnnnnnnnnnnnnnnnnnnnnnnnnnnnnnnnnnnnnnnnnnnnnnnnnnnnnnnnnnnnnnnnnnnnnnnnnnnnnnnnnnnnnnnnnnnnnnnnnnnnnnnnnnnnnnnnnnnnnnnnnnnnnnnnnnnnnnnnnnnnnnnnnnnnnnnnnnnnnnnnnnnnnnnnnnnnnnnnnnnnnnnnnnnnnnnnnnnnnnnnnnnnnnnnnnnnnnnnnnnnnnnnnnnnnnnnnnnnnnnnnnnnnnnnnnnnnnnnnnnnnnnnnnnnnnnnnnnnnnnnnnnnnnnnnnnnnnnnnnnnnnnnnnnnnnnnnnnnnnnnnnnnnnnnnnnnnnnnnnnnnnnnnnnnnnnngccaactcagtaatcaattgagaagcttcctgaacagagaggccttcatcggcaggtatctgcctccgggatctagtactttttgcttttgcttctcgttggcagcgcgtaattcgcttacttctttctcaagaaaagcggcagattgcatggtaatctggcaggcttttaaaacctggttaattgccgaactaagcgggctcggagggcttcttgatctcatccgaagcaatgctttaatagacgaagcttgcttttgtaattgaatgtagtttgatggcgtttttgggtcccaatcgctatcccggcttaggggggggggtaggtgttcgaagacaaatattcagctttgaaagtacccgatcgggtgaaaaaggtattaaaccggctgctgagaagctatttttaatcgtctccgatttaaaagcttcaattcgtgcagaggggtatgcttcgaggaagtcatgtttatcaatatggttgatcctggtccgcatttgcatctcaaccaaccggccgtacgaccgttttaccaccgcaaaacaaccaatatcaagtggttgtaaaaggtgagatgaatgcggtggcatacaaattggtatgatcttgttttgcacacaaatctcatcgaattttggggttaaatggcttccgtggccgtcgagtactaaaagccgatatacccccttcatacgagaagaagtagctggaataaagagcttttgtagccaacgaaggcctatttcatctaacgtccacccatttggactaacttcaaagcgccagtcgccaggaaggccttcaaaccatgattcaaggaagaccttgcctttgaaaataatacacggagggagggcccaccccgctgcatttagacattcaattgtagttacccactcgcgatttccaggttataaaagtgatctccgaccgtagtattcacttcttgttataacccttaccgttgcagttaatcccattgcgaaaccagtctcgtcgaagttataaacatcgtcagggttgattccaaattaaaggatagttttttgaacgagattaaaccactctccaataatcttcggatcttcatacttcgcgcgctcgtaattatagcgtctcgagaatcgggaggaaaggagagggtgccgttttatgaattttgtaacccaattttggccaaccgaaagaactagggtagttccacgctttttgaggagaagatccgccatttctcgtaccatagagtgtcacgattggcacttgcggaagtcgtaccttcccgtttgtttgtacaagaagtcgtactttccttccagggtaagcgaggatagggctatgcccccaaagagtataaagaccccacagatgctttacgtttgttttcttttcttttccttcttcatacttgatatttcagttagaaatgcacttctttatttgaaagaacctggcaggtaacatagagggccgcggggctgctccacaagaatccatagagagaatccatttttcaagtgattcctcttcaatttgtgtcaatttacgtgaattggcgcgagaaatcgcgaggttttgtatcccactaaggcagcggcggagggtagtttcgggtacatcaaaacggcgcgctacttcacgaattgaagagatttcttgattcttaaaagcctggatagctagtaagatcctaccctcttgctctactgaatgtttagagcttcgggagcgaattggtggcatagtgggtggttgaagaaggagggtttaagttaattgacgcgttttggatggggtgcgccacttgggggtgaattacgttaccgataaaatcatctagaataactaaagtgttaggtgtggggttgaccaattgcataagatgcatagtttaagaaggctaaaataatatatcgtcgccacgcataggaggtggaaatcgtgggaccaggcttttgaatttgatcggccatcccaaattttactcctttatgcttcaaggggtcgaatccagtagggtattcctctccaatgggagaggtacgatcaaagctgatgatagagatggccaatatcgaaggctgcatattgtacgtagggatacagtctcaggctgaaagggatctcgctagccagtattgaaaatggcccatcaatgacaagatggttgggttgattgaggatttgttgggctacgtattgggtgttacgacactgttcttccggtatgttgagatttaccatacataacacgtcggcgttgggtgatactgaatgaccttgtacgacaatacaatgcggggaactcacggtattttacccctcatgtgatattacataagcttggcggctcagggtaggctcagggttggttcagggtaggctcagagttggctcagggtaggctcagggtggcttgggtagggtcaaattaaacaacgtctcggtgggccgactgatgactacgttgtaaattatgaggaatcttgacgttatcatcgtgtctccccagctcaaaaagcttgtagtaaaaaagaaaacaggagaaaaaaatccttcccttgcatttatgagattcctttattctatagaggattgactagtcgatatcctacggctgaccttccgaaggaacgtagagaaaaaaaagcgagtgatgtctcaggggatgaaagtatatatcaataggaagtcggatttttctctggtcagaataagcggcggcaacgggtttgccttaatttgtctaagttgtcacgattggcacttgcgggactcgtactttcccgtttgggattgtaccgttggtcgtttgcgcaggcagtcgcaccttccttctgggggaaacgagaatagggctttgtccctaaaggggtataaaagcctatttgttgttttcacgtttgtttcttttcttttccttttccatacttgatattcgattagaaatgcacttcttttgttaaaaggaatctggcacgcaatttagcaatgcacttcttctgctagaaagaacctggcacgtaacataagtaagattaagacgctctggtgattgcttcgaaaagagactcatacgatgtcgcatgtcaatagcagtgttgaagccggatgtatgtaaacggccctgtcggaacacctacgagcttctagagctgtttggagatatcatataatactgagggcggtgcaaaggaatctcttttcttcagcacatggctttcgatactgggccagaagtgacacggcaaaaacgacgaaggagatagcgggaaataaatgaatgtaaataataatatacagaatgtgacgatctgggaaggatcgtacttgccaaacgaggcaggaacgactatgccctcgcaccttcccaagtggacgaacgagaattaagcgagacaaacgcaagggtataagaagggaagaacgcgcactcagatagtttctctttttcctttcttcttcgtacttagaatttggtttgaattacactcctttcttctgaatcgaattggctcgtaacacagaatatgtttgccattgactcaagatacagaggtatagagcctcgagatgaataatgaattgcaagaacaaccatagttgactcgagtctatataaaagacttagcgcgagcgcgagaagacaagcgaaagatacactatgtaggtccgacatatcatctctcctccacttctcgtgtatgccctattgatatccctaacagctgacgaaactcccaggatacttcatttttgatacccaaggaactcacctgtcaagcacctgtcaagggttttgtcactgaccaaaccttgtgcccttttggccagctagcataagggacggcctgagcacttgtggtctgtcgtgactctacaagccattcttcaggtgccactataattattctgatgaatggatagtactctgagaaacataccgattacttacaggacgaacgatgcacttcctaggagcttatgatccacaatccggctaccaagaaatccggcagcatattttaattaagcataatttgtgagaccaactggtattataagtagtgtttctcatcttaggttttcactcgtacccgtttagcttctcgttgtctcaagcgtattgctacaacaatcacctctgtatactctattctttgcctcaaaataccatcccaccactcacaaaaactgcctcgcagcgatacggtttctgcctcttggaagaacatctgaatgattcattccagtgtcccagagtgatcgcctattcagttgttgtacctacgccgccgaatagctactacgcattttacttcacaagtccagagtaaggaatacgatatttgattcccccacaagacctcttcgtccctgtcggccatgccgcaactcaaaaatccgatgcaaccgtgaagtttctcattttcaagcttgtatcaagcgaggtaaaagctcgttgtgtgtctatgagatgagagtgctaaaccaaagttctgctcttctaggaccagccggcaaaagcaagtgcaggaggatgaacttggcgagcatcacattccatagaaggcttttgggtcgcaacccgaatagtatttgcagcacgaaaagaggtactacaagcgaagagctgcaacacactattgagccttcagatgaagcagatatcaagcacttggatcaaagtcattctaggaggggcgatttggcacctcacgaggcgttaccaaagagtattgcggctacaaatgcggaggaaactttgatttcctaactaaattatggccgtgcagctgttgaagttattcttaaatggccacagcatatcaggatctcaaacaacaaagctatatgtacagatgacccctccggtagccaatatcaacccgtgagaaagctaagaccacaaggctgactatcgataagactttgtcagaatctaggatgaatactgtcatttttcatccctgatacagttggatcacgtgactnnnnnnnnnnnnnnnnnnnnnnnnnnnnnnnnnnnnnnnnnnnnnnnnnnnnnnnnnnnnnnnnnnnnnnnnnnnnnnnnnnnnnnnnnnnnnnnnnnnnnnnnnnnnnnnnnnnnnnnnnnnnnnnnnnnnnnnnnnnnnnnnnnnnnnnnnnnnnnnnnnnnnnnnnnnnnnnnnnnnnnnnnnnnnnnnnnnnnnnnnnnnnnnnnnnnnnnnnnnnnnnnnnnnnnnnnnnnnnnnnnnnnnnnnnnnnnnnnnnnnnnnnnnnnnnnnnnnnnnnnnnnnnnnnnnnnnnnnnnnnnnnnnnnnnnnnnnnnnnnnnnnnnnnnnnnnnnnnnnnnnnnnnnnnnnnnnnnnnnnnnnnnnnnnnnnnnnnnnnnnnnnnnnnnnnnnnnnnnnnnnnnnnnnnnnnnnnnnnnnnnnnnnnnnnnnnnnnnnnnnnnnnnnnnnnnnnnnnnnnnnnnnnnnnnnnnnnnnnnnnnnnnnnnnnnnnnnnnnnnnnnnnnnnnnnnnnnnnnnnnnnnnnnnnnnnnnnnnnnnnnnnnnnnnnnnnnnnnnnnnnnnnnnnnnnnnnnnnnnnnnnnnnnnnnnnnnnnnnnnnnnnnnnnnnnnnnnnnnnnnnnnnnnnnnnnnnnnnnnnnnnnnnnnnnnnnnnnnnnnnnnnnnnnnnnnnnnnnnnnnnnnnnnnnnnnnnnnnnnnnnnnnnnnnnnnnnnnnnnnnnnnnnnnnnnnnnnnnnnnnnnnnnnnnnnnnnnnnnnnnnnnnnnnnnnnnnnnnnnnnnnnnnnnnnnnnnnnnnnnnnnnnnnnnnnnnnnnnnnnnnnnnnnnnnnnnnnnnnnnnnnnnnnnnnnnnnnnnnnnnnnnnnnnnnnnnnnnnnnnnnnnnnnnnnnnnnnnnnnnnnnnnnnnnnnnnnnnnnnnnnnnnnnnnnnnnnnnnnnnnnnnnnnnnnnnnnnnnnnnnnnnnnnnnnnnnnnnnnnnnnnnnnnnnnnnnnnnnnnnnnnnnnnnnnnnnnnnnnnnnnnnnnnnnnnnnnnnnnnnnnnnnnnnnnnnnnnnnnnnnnnnnnnnnnnnnnnnnnnnnnnnnnnnnnnnnnnnnnnnnnnnnnnnnnnnnnnnnnnnnnnnnnnnnnnnnnnnnnnnnnnnnnnnnnnnnnnnnnnnnnnnnnnnnnnnnnnnnnnnnnnnnnnnnnnnnnnnnnnnnnnnnnnnnnnnnnnnnnnnnnnnnnnnnnnnnnnnnnnnnnnnnnnnnnnnnnnnnnnnnnnnnnnnnnnnnnnnnnnnnnnnnnnnnnnnnnnnnnnnnnnnnnnnnnnnnnnnnnnnnnnnnnnnnnnnnnnnnnnnnnnnnnnnnnnnnnnnnnnnnnnnnnnnnnnnnnnnnnnnnnnnnnnnnnnnnnnnnnnnnnnnnnnnnnnnnnnnnnnnnnnnnnnnnnnnnnnnnnnnnnnnnnnnnnnnnnnnnnnnnnnnnnnnnnnnnnnnnnnnnnnnnnnnnnnnnnnnnnnnnnnnnnnnnnnnnnnnnnnnnnnnnnnnnnnnnnnnnnnnnnnnnnnnnnnnnnnnnnnnnnnnnnnnnnnnnnnnnnnnnnnnnnnnnnnnnnnnnnnnnnnnnnnnnnnnnnnnnnnnnnnnnnnnnnnnnnnnnnnnnnnnnnnnnnnnnnnnnnnnnnnnnnnnnnnnnnnnnnnnnnnnnnnnnnnnnnnnnnnnnnnnnnnnnnnnnnnnnnnnnnnnnnnnnnnnnnnnnnnnnnnnnnnnnnnnnnnnnnnnnnnnnnnnnnnnnnnnnnnnnnnnnnnnnnnnnnnnnnnnnnnnnnnnnnnnnnnnnnnnnnnnnnnnnnnnnnnnnnnnnnnnnnnnnnnnnnnnnnnnnnnnnnnnnnnnnnnnnnnnnnnnnnnnnnnnnnnnnnnnnnnnnnnnnnnnnnnnnnnnnnnnnnnnnnnnnnnnnnnnnnnnnnnnnnnnnnnnnnnnnnnnnnnnnnnnnnnnnnnnnnnnnnnnnnnnnnnnnnnnnnnnnnnnnnnnnnnnnnnnnnnnnnnnnnnnnnnnnnnnnnnnnnnnnnnnnnnnnnnnnnnnnnnnnnnnnnnnnnnnnnnnnnnnnnnnnnnnnnnnnnnnnnnnnnnnnnnnnnnnnnnnnnnnnnnnnnnnnnnnnnnnnnnnnnnnnnnnnnnnnnnnnnnnnnnnnnnnnnnnnnnnnnnnnnnnnnnnnnnnnnnnnnnnnnnnnnnnnnnnnnnnnnnnnnnnnnnnnnnnnnnnnnnnnnnnnnnnnnnnnnnnnnnnnnnnnnnnnnnnnnnnnnnnnnnnnnnnnnnnnnnnnnnnnnnnnnnnnnnnnnnnnnnnnnnnnnnnnnnnnnnnnnnnnnnnnnnnnnnnnnnnnnnnnnnnnnnnnnnnnnnnnnnnnnnnnnnnnnnnnnnnnnnnnnnnnnnnnnnnnnnnnnnnnnnnnnnnnnnnnnnnnnnnnnnnnnnnnnnnnnnnnnnnnnnnnnnnnnnnnnnnnnnnnnnnnnnnnnnnnnnnnnnnnnnnnnnnnnnnnnnnnnnnnnnnnnnnnnnnnnnnnnnnnnnnnnnnnnnnnnnnnnnnnnnnnnnnnnnnnnnnnnnnnnnnnnnnnnnnnnnnnnnnnnnnnnnnnnnnnnnnnnnnnnnnnnnnnnnnnnnnnnnnnnnnnnnnnnnnnnnnnnnnnnnnnnnnnnnnnnnnnnnnnnnnnnnnnnnnnnnnnnnnnnnnnnnnnnnnnnnnnnnnnnnnnnnnnnnnnnnnnnnnnnnnnnnnnnnnnnnnnnnnnnnnnnnnnnnnnnnnnnnnnnnnnnnnnnnnnnnnnnnnnnnnnnnnnnnnnnnnnnnnnnnnnnnnnnnnnnnnnnnnnnnnnnnnnnnnnnnnnnnnnnnnnnnnnnnnnnnnnnnnnnnnnnnnnnnnnnnnnnnnnnnnnnnnnnnnnnnnnnnnnnnnnnnnnnnnnnnnnnnnnnnnnnnnnnnnnnnnnnnnnnnnnnnnnnnnnnnnnnnnnnnnnnnnnnnnnnnnnnnnnnnnnnnnnnnnnnnnnnnnnnnnnnnnnnnnnnnnnnnnnnnnnnnnnnnnnnnnnnnnnnnnnnnnnnnnnnnnnnnnnnnnnnnnnnnnnnnnnnnnnnnnnnnnnnnnnnnnnnnnnnnnnnnnnnnnnnnnnnnnnnnnnnnnnnnnnnnnnnnnnnnnnnnnnnnnnnnnnnnnnnnnnnnnnnnnnnnnnnnnnnnnnnnnnnnnnnnnnnnnnnnnnnnnnnnnnnnnnnnnnnnnnnnnnnnnnnnnnnnnnnnnnnnnnnnnnnnnnnnnnnnnnnnnnnnnnnnnnnnnnnnnnnnnnnnnnnnnnnnnnnnnnnnnnnnnnnnnnnnnnnnnnnnnnnnnnnnnnnnnnnnnnnnnnnnnnnnnnnnnnnnnnnnnnnnnnnnnnnnnnnnnnnnnnnnnnnnnnnnnnnnnnnnnnnnnnnnnnnnnnnnnnnnnnnnnnnnnnnnnnnnnnnnnnnnnnnnnnnnnnnnnnnnnnnnnnnnnnnnnnnnnnnnnnnnnnnnnnnnnnnnnnnnnnnnnnnnnnnnnnnnnnnnnnnnnnnnnnnnnnnnnnnnnnnnnnnnnnnnnnnnnnnnnnnnnnnnnnnnnnnnnnnnnnnnnnnnnnnnnnnnnnnnnnnnnnnnnnnnnnnnnnnnnnnnnnnnnnnnnnnnnnnnnnnnnnnnnnnnnnnnnnnnnnnnnnnnnnnnnnnnnnnnnnnnnnnnnnnnnnnnnnnnnnnnnnnnnnnnnnnnnnnnnnnnnnnnnnnnnnnnnnnnnnnnnnnnnnnnnnnnnnnnnnnnnnnnnnnnnnnnnnnnnnnnnnnnnnnnnnnnnnnnnnnnnnnnnnnnnnnnnnnnnnnnnnnnnnnnnnnnnnnnnnnnnnnnnnnnnnnnnnnnnnnnnnnnnnnnnnnnnnnnnnnnnnnnnnnnnnnnnnnnnnnnnnnnnnnnnnnnnnnnnnnnnnnnnnnnnnnnnnnnnnnnnnnnnnnnnnnnnnnnnnnnnnnnnnnnnnnnnnnnnnnnnnnnnnnnnnnnnnnnnnnnnnnnnnnnnnnnnnnnnnnnnnnnnnnnnnnnnnnnnnnnnnnnnnnnnnnnnnnnnnnnnnnnnnnnnnnnnnnnnnnnnnnnnnnnnnnnnnnnnnnnnnnnnnnnnnnnnnnnnnnnnnnnnnnnnnnnnnnnnnnnnnnnnnnnnnnnnnnnnnnnnnnnnnnnnnnnnnnnnnnnnnnnnnnnnnnnnnnnnnnnnnnnnnnnnnnnnnnnnnnnnnnnnnnnnnnnnnnnnnnnnnnnnnnnnnnnnnnnnnnnnnnnnnnnnnnnnnnnnnnnnnnnnnnnnnnnnnnnnnnnnnnnnnnnnnnnnnnnnnnnnnnnnnnnnnnnnnnnnnnnnnnnnnnnnnnnnnnnnnnnnnnnnnnnnnnnnnnnnnnnnnnnnnnnnnnnnnnnnnnnnnnnnnnnnnnnnnnnnnnnnnnnnnnnnnnnnnnnnnnnnnnnnnnnnnnnnnnnnnnnnnnnnnnnnnnnnnnnnnnnnnnnnnnnnnnnnnnnnnnnnnnnnnnnnnnnnnnnnnnnnnnnnnnnnnnnnnnnnnnnnnnnnnnnnnnnnnnnnnnnnnnnnnnnnnnnnnnnnnnnnnnnnnnnnnnnnnnnnnnnnnnnnnnnnnnnnnnnnnnnnnnnnnnnnnnnnnnnnnnnnnnnnnnnnnnnnnnnnnnnnnnnnnnnnnnnnnnnnnnnnnnnnnnnnnnnnnnnnnnnnnnnnnnnnnnnnnnnnnnnnnnnnnnnnnnnnnnnnnnnnnnnnnnnnnnnnnnnnnnnnnnnnnnnnnnnnnnnnnnnnnnnnnnnnnnnnnnnnnnnnnnnnnnnnnnnnnnnnnnnnnnnnnnnnnnnnnnnnnnnnnnnnnnnnnnnnnnnnnnnnnnnnnnnnnnnnnnnnnnnnnnnnnnnnnnnnnnnnnnnnnnnnnnnnnnnnnnnnnnnnnnnnnnnnnnnnnnnnnnnnnnnnnnnnnnnnnnnnnnnnnnnnnnnnnnnnnnnnnnnnnnnnnnnnnnnnnnnnnnnnnnnnnnnnnnnnnnnnnnnnnnnnnnnnnnnnnnnnnnnnnnnnnnnnnnnnnnnnnnnnnnnnnnnnnnnnnnnnnnnnnnnnnnnnnnnnnnnnnnnnnnnnnnnnnnnnnnnnnnnnnnnnnnnnnnnnnnnnnnnnnnnnnnnnnnnnnnnnnnnnnnnnnnnnnnnnnnnnnnnnnnnnnnnnnnnnnnnnnnnnnnnnnnnnnnnnnnnnnnnnnnnnnnnnnnnnnnnnnnnnnnnnnnnnnnnnnnnnnnnnnnnnnnnnnnnnnnnnnnnnnnnnnnnnnnnnnnnnnnnnnnnnnnnnnnnnnnnnnnnnnnnnnnnnnnnnnnnnnnnnnnnnnnnnnnnnnnnnnnnnnnnnnnnnnnnnnnnnnnnnnnnnnnnnnnnnnnnnnnnnnnnnnnnnnnnnnnnnnnnnnnnnnnnnnnnnnnnnnnnnnnnnnnnnnnnnnnnnnnnnnnnnnnnnnnnnnnnnnnnnnnnnnnnnnnnnnnnnnnnnnnnnnnnnnnnnnnnnnnnnnnnnnnnnnnnnnnnnnnnnnnnnnnnnnnnnnnnnnnnnnnnnnnnnnnnnnnnnnnnnnnnnnnnnnnnnnnnnnnnnnnnnnnnnnnnnnnnnnnnnnnnnnnnnnnnnnnnnnnnnnnnnnnnnnnnnnnnnnnnnnnnnnnnnnnnnnnnnnnnnnnnnnnnnnnnnnnnnnnnnnnnnnnnnnnnnnnnnnnnnnnnnnnnnnnnnnnnnnnnnnnnnnnnnnnnnnnnnnnnnnnnnnnnnnnnnnnnnnnnnnnnnnnnnnnnnnnnnnnnnnnnnnnnnnnnnnnnnnnnnnnnnnnnnnnnnnnnnnnnnnnnnnnnnnnnnnnnnnnnnnnnnnnnnnnnnnnnnnnnnnnnnnnnnnnnnnnnnnnnnnnnnnnnnnnnnnnnnnnnnnnnnnnnnnnnnnnnnnnnnnnnnnnnnnnnnnnnnnnnnnnnnnnnnnnnnnnnnnnnnnnnnnnnnnnnnnnnnnnnnnnnnnnnnnnnnnnnnnnnnnnnnnnnnnnnnnnnnnnnnnnnnnnnnnnnnnnnnnnnnnnnnnnnnnnnnnnnnnnnnnnnnnnnnnnnnnnnnnnnnnnnnnnnnnnnnnnnnnnnnnnnnnnnnnnnnnnnnnnnnnnnnnnnnnnnnnnnnnnnnnnnnnnnnnnnnnnnnnnnnnnnnnnnnnnnnnnnnnnnnnnnnnnnnnnnnnnnnnnnnnnnnnnnnnnnnnnnnnnnnnnnnnnnttgttttgtttgttttgattactaagttgtccatcagattgtcatgttttaggactattgtcagttttagagagttagagaatttattaagatttttctgccacaaaatacactcgccttaccaccgtttttccgtcagacttctttgcctccacggccgaatttcaatattactagggagatataactacggcccacatacgatccaccaactgttgttggtattgaacttccttttcgtctccttgatgctttctctaaatgtaggggctctgtggaaggtaatatatcgccgcgactgtgattgggaagagagctttgtcttacagcacagtcagcttcaagggtgagtggtcgggcggtggaggagaatacctcacggcgggaatcttagtccatcgaattatgtaagtttcttaaacagggggttcaacttttggaaatctatctggttaattacggcgtcatcactgtcatctgcctgcaataaccactagtgtggtaggtaattgattagaatgaaggtatagtgtagtggatatgtcattttcgtaataaatttatccattcgacaggtagacagtatatcgtaagagaattcgtaagttcaataagttttgtaattatatatatacattcgatatgtgagtatcaactgcttttatatattttgaatcacagtttcaacttcatggttgattgtcgtttattaatttccacttaaaatgaacacattcattatacataattttagtcaaataatttgaatatatgtcattatttgacatttacgtggttaaaaaataaaaacgtagtatgaaaagtccaagcgaccgaagtgcgtctttgtaagcgggcccgcccgcgcgtgcgcggaggttttgccatctcacccacacatatcaatttacaccgacccaattgcgtcagtcatttctagttcgcttgagaaccttaccaggcttcacagtttcaaagagcggcaatggtctctctgcagagttgctaatcttctctagcaccgaaacacagttttaatctcacttttgctattggcgacgctgtcttcgactgtaatgtgggtcttgtaaacggcggacctgtgaattactgtatgcggttagttttgcctttcttggtttagcgcctcaatacgctgtcacgtaacccgtaacctacgttgagtgccctctgactaaaatatgtattcgtctcccctacctttctctcacctttccatttttctgcctctctatcttgcactcatcgcctccgcctttcttttactctggcccccaccgactactgcacattt

SEQ ID NO: 159 - DNA, 249253 bp, Penicillium roqueforti
  misc_feature (178620)..(178843): n is a, c, g, or t
  misc_feature (245417)..(246606): n is a, c, g, or t
attttatatgtacttaggctctatgatttcctatatagactctagtccgccagcggctgtaatatcgtccaacgcgagcttccgtagctcggcggaaagggaattcccaactttgcgctgttgtagaatattgagtaatcggccgcgatattgtcctcttcgccaaggtatggataagaggtagagagatcttgccttcatttagatcctctgcgaagccttttttctttgtatactgtcaatttgggtaagcgcagtcaaaaaaaacagaatcaagagttaaaaaaccctgtcatagaaagaaaaggttttcatcatacatccgcatctaggaggtttagatagtcatcacggacttggaagaacctgcctacggccttcatgaagggtgagacatcgaggtctttgttcactgttgcctcggagcgcatcaattcggccacaagaacaaaaaaaccgccggtttctgagatagaataatgatcagcatttaagtgagcgttggggagggtaattgatcgaacatactaccatcaatcatagtaaaatattcctcctctgtcggaaccaccgtctgatttgtccagtgtagatccattccctggccaatgtggccttctatcagtctggttgtgaagatagcagcagcattgggtgacagtttcatcgcagcccttgaggctctcagcagtagaaggtttgcagaattgattgtctggccaatgccaaaaaccaaatgcgtagctgggaacccacgtcttaatggtgagttatcctgtatgtcatcaaccctagttcatatttgtcaatggcccgggatattgacacagcgaagaatcagagaaaatcatacattagggaggaactgtgtagcaaatcggcaatctcttgaatgattataacagatcgttccgggacttgataccagacgtcaagaccatcaattgctgcattcctcaccccctttgacggtagagacttgaggtagacatagggttccaatgcaatctagattctgcttagtacatctccagtatctggaggctgtgggcttacttcttcaaattccgagatatggaggggggtatcgtctctttgattctcgaattctgataacgcagggctgatgggtgcattgctagcttcaccattcgtgctagatcctaggatgttcggggaatcaagggtttcgaatcccacaaaattatccctttttgcaattatcgtaagcgatgtgattggtttgcttaggctgctgaaaggatgagaggctttctttttctgactcacaacccgcaaacccggatacgcatcttcaacgtcatcgtggtatcgtgcagtggtcatgctccacgcaaagttcccagcagtcacaatgtccagtaactcaaaccatttgattatgctttttgtcacgtttccacgagcgaagtaatcggccttgagctggcagtacctttcctcgcgagcaataatctcactccggagcatcttcttagccgtggtcggatcgatgttatgccacttcatgaaaagaaagactgcgctaacaatctggccggtgcttccgttggattcgtagttcttgtgctctttttcccaggaaaagtagtcattcaccagaacccaagcatcatatgcggcacttgtaatgctggaagtttgtgcggtctcttcagccgtgaggtaaaaatccatggaaaaacacatcaaggccatggtccacctattcagcgcagttagctgagaatcctcactagggctcgctcgaaacatgatatcttacgggcatcctgcatcaacagcgcggaatatgaaataatcttccaatgtttgaaagtcaagatctctgatatccacaaacacgtctgacatctccttccagagacggagaataacctggccctgttctaagtcgaattctagaagctccgtagccattttagcttgcatttgtctcttcaaattgcttctcgtagatagttttccatccccatactcctcgaggccttctgtgagttgcttgtttgctttgtagagctgcaaaatgtgtcttgtcagaagaggcaaagataataaatgtatcaaaagtaaatactcacttctgactcgcgtttctcttcggcatattcaatgactgtaatgtttagttggtttattgggccaatttgagcatgacgggggccacttacggtcatcatgcacgtacgtatacttaataatgtatgaaatcaaagcaagccgcttaggaattgcttcaactgcatatagagctgtaaagttaccaacggtcgggttgatacaaccaacagcgtagcttttgttgcttccactccgaaccgctgcagcataagcagccccttaagaacccagaagatccatctgacattgccaacaccctgaatcggcgagatgagtatcacggtggatacaaggagtgaacttgcaaaagtactcttctctcttatatgcttctcggggaactggaagggaatcaggtacaaagtgtctcgtaggatcctgcctccgcggcaatatgattgtcttactcttaaaggatagagaaatcggacgtgatgttttcagtcgggatgatgggaatgacttggaagacatttcatgaggaagtatcatctattaaatatccagttgtgtgggatagaaactgaaaaatctaataataaaaatgaggagatataatgcttatatgtcattagctcgaactattttccaaaactctgtgtctatatgaatgtgatctatatgaatgggatgttcctatgattttaaatcagatatttatgaccatatatagtagtactactgtatataattccaattattgtgctgtacgcatataatcaaagtttagtagaattatcgtgaggctaatatatacgaaaaaccatgtgatcaaatatataatgtggcccacatttccattttaggataaaacctactaatctagtatacagcttgagtctgatcatctggggctatcgattcaaatgagcatgaagtttcaatccctaaaaagaagttaggatgtttctttctattctaatagtaaaatctttgattgacagtcgatatcgatattcgatatcgatatttttccttaaaaaaagcaattctttatggtttgatgttgtttacaactgtacatgtcacctatgaatttgatagtggctgcctacgatagtctaccctataaagatttacccacttccattttgtttttcttggtgtataaatagcgtggtatataattcaacatacattacacaagtacctgagtacgtcggtatgttaataccgagaggttgtataatatagattgcatccacaggaaatgctatcatgtaatggcgattgttccgccaagaaataaactttttagcgattttttaacaagggaggatatttaaatgtgggggacagtttaacctaatgaactctttgataacctaatcgatcggtatttatttcttgaaggaatggcacttctagataacatgggggtttcttgctacctgacattgattatgtctgccagtctggtaagttgaggctggttctctttaaagattaccttatgtatgcctgttgactgacctcgggatgtatttggtaagttgtggttatcctctaaagctgtttataatatatggtttcatccattgaggaatttccccggtccatggtacaccaaagtatctaggatttggtacgtcttgcgggtcctccagggatgccacaaatatgagattaaaagactccacgatgaatatggcctggtcgtgaggattgtaccagatgaactctcatatattgatcctagggcttggaatggaatttatggtgaaaaaccctcttccttatctttctaaggtcatgaaaatgcactaataaactacaatttgaaggtagcgttgtctataaccatggattatatccgatggagaaagatggggatttttttgcaacagcctttggagactcggaaactcttgttaggatatgctaccctgatttatttatcctaatatttctctgactaatggaaactaggtgggcgctaagagtgcggagtataaagtttaaaagaacaatgctgtccggggcttttcatatgggcaactgcttcagaaagaggatatgatattatctcacgtggaatcttttacccacaacctcaaaatttatctcgaaacgaaaaacgaggatatcatcgatatcgatgcctagattgggaacttgatactcgatatctatgtgaagcttaccataggccacgatttctatactatcgataaggggccttcatcccacaccttggtgagcactatatataagatagcgaaggccttgcagtatattacccaacttctttaccttcctctatccctatcgccccttttccgcttatggatatttcgtcgtgatatctttactatattcagcagacttcctcctttaggaacagcaattactgagcgcctggagcggatgggtaccactgataaccgtgtggacttgggtaagaaagctgtcctgattcctggctctaacttctgatgtaatactcaccgtttcaaagtatactatatagagaatgattaagaggacggcataattgattccgatacgataaaaaggaacgccttgattgtgattcttagcggaattgagacactccctgattatattggttctgttatttactatatgctccaaagtcccgagcattttgctcggcttaggaaagagatacatactgtatttacagtctccgaggacattttagcggaagcagttcaaaatcttaaatttttgaaagcgtgtatgaataagagccttcgcatggctctgccatttataggcaccctacctcgtcgagttcctgcttgtggtgtgtatatttgcggccagtttgtaaagggtggtactactgttggcattcacaattggtctataatgtatagtgggaggttttggaaaagtcctgaggttttctgcccagatagatggatggacgaccctaaatatgaggacgatacgcgtgaggccttctatccgtttggagttgggcctcgaatatgtgttgccaggaagtgggtctactacagcccccgaaaacatatatgagattgctgatcagataccaaatccagtctcgttattattaaagccagtcttatcctcgctcggatcctgttcgactttgatatggagttagagctttccagcagccatgattggccgaagagaaatggtcacctggttccgaacaagcgtccgctatttataagagtcaaagcggacacgggtgaaggaatctagtagatgtttgacccttcctgctaccaaatagctcagagttgcctcggaattttctactatgaagtaaatagaaggatgcttatttagtcgaaaatcggtgaggtgcctctgtttaaatgtacaatccgcaaccaagatatttgttctccacgtctttttcttcagggtcccatagcgaacgtggcgatgttgcaccgcttagcttataaaaggtaatgacgaggtggccttgatgatacgattccaagtatgcagcatataaagattgataaatggtgtatccattgccaatctcttcttattgattcctatagagttctattatgagggcatatcaaactcgctatagaaaaccattggaaaaaaaccattagcagagaaatatcaggcttagatggagtctgaggacactgtgctttatgcagaacacgtccgattcagttaccccctgggcccctgagacctctatggtatggtggaatacgaatattgaatccaacactatgcctgatgtacattctgggtaagcgttttaggctgatcgctgcttatctcaatgaagaacatagaaatatgagacatcagcaagaaaagacctatgcatacctattgcatacctgcgcaagcaacttatcattttcgtgaaacaagcggtgtggatcctcagccagccactcctgaggtctggggtgatccccatggatctaccgaaataaagtgggcgggtggagtaaatagaaatttcggttggcgggcgaaaccgtaaggtgtagctacgaatgcaagatagagtggatgagataatatgaagaggtgtgggaatgaaaggctattgtacagggtttcctgggtgggatatcacatccaaagcccgacccgcatgttaccaccaatgaagcaaagtatataacgcatagtaattcgaatgcgtaactagttagtgaagagggatatacatcattattctcacttctggttaatcacacccttcttgcgtagtctgcgcctccatcatatctgttaaattacatcatacttttcgtactgcaaatttctgtcaatgatcaatattctcatggtcactacgattagagtgggtgacattcggtcggttccccgtaccatatcaaaaatgttcaattatctatcgtaataactagcgcagtaggacagctgaaattaaaatgggggatatttacctatcagaattcagcttaatcggaattgatttaggctctgcagtctagtcaacaaattactgtcagaagtaatggattttgataggcggggggacgggagcacgcagaatggagaatgaggaagcgaagaaaggcagtgaggccgagtgtataaagagaaatcttaagaagagaatggacaatatcgagaaattttagttcgtcctaaatatactcaataatcgatatattgctcggggacccctaaaccccaaaccaatgaggaaatttgttttctctggtgtctacctttcatcgcgcttttttcgagaagcaatgagatagtgtcttgaagagctttaaggagagtttcagaaaacgtcaaattggaaatatactgaataaggtctatcggcagataaagagtaacaatcttccgtcctgcaatgaggttttgttgggtggccggaaggcggtcacccatgtaggtacagatcaccagatagttccgctctctcttcctctctctcttcccctcctgtccatgagaacttagcagaatcaataccagttgtttcctctttacagacacaaagtagtacgatctccattaggttttcctatccttcattgaccgcaaggggctgctaatatacccttggatgctgaaagtttttgagccacgagccaaattttccttaaagtctaaactccctagtgggcttgcaggccgctgctgtcatattccttcggctactacggaacaaattggttctgtcagcaataggctagggtacagtgacgaggagcttgatttcctctgggaagaaagcggcactagtggcaaagattgggatattatctttgacaaatttaaaaagagagtcccctaccagaaatgttcttctcgcgaagaatagaccgggattttgtagtggagcgatatgttcaaaatcaaagcagtgtcaggacctttgggcaatatcattcatgatcccggaaacattaataggttgagtggaaattttttcatggaagcggtacggaaattcgccctcgatacgatcctctgggtttagcgattcggctccgttggcggcgtcatcgacgtttgtaaacctcaagttcgatggaaccgaatcttgtgaaacagagacagggtatctagcgggatgatcggttcttcggaacttctctctccctgattccatccccgaaactaggccatgatagagaatcacttaataaaagttcgcacggagtaggttaagtcgttaaatgaagtcagctcacagttgtaggaattttgcaattgattgaaccatagatctaggtcttgtactagatcgagcagatgtatcttactctgtaaaatcgtgatatgtatactgtctgacattggtatgttcgcaaaacgttgtatttcattatagcggaatacgaaggtgtatagttagttaacggccaacagtcggatgcctgattttaatggttttacagcgtaattaggactagctcctaccagctttaggctgacagaaaattaaaatacctgaattaccatgacagatctgctggcttgaaacttaaaatatgaagctattcatacccaccacagtcctgtactttcccggagaaaagctgacagcgctactgaaaccaaggcccaaaacgtctggaaagccaaccctagattttaatataaagtccctattactaccggccgtacaaacttcaaactctctgtatcctctggctccagcgtgccgaagtgcccttggaggggttgcgctttcaacgactgtaataggaggcggtgatccgaatgtaggagacgcgttgaggtaacttcaatgtgaacttacaaaatatggtattgagcggtgtgaaaggcggtctaaaactggtaactaagagctaactagtcttaattaggtcataaaaccattaaaatcaggcatccggctgttggccgctatacacctgcgtagcggaatcttcgaaattgatctatatgcaacccaacaatggcggaacttgcgctgtaactatatgcttggcagataattttcttttaggcgttcgcaaatgatcttttaaaaaactatatgcttgagaccagcatataaggctttcgagaagaaactattaatcccataattgaaaatgtcgaatttcgtacagcgtaatttaccactagaccataacaaaaaccaaggttcctgtttagggcctagaggggccatatcccattcttgacagaaaacattgatgtcggaaggaattgcagacaagatgtgctgataaatttcctcgggttcgtcggataaacttcatgatccagctgttggtttgtgaattctagagcaatcgacctgagtgcaagaagtctcaagagcttgtcctcgggactgagtattcgatctccttctacgcaccttatgtgctcaaatcgaaggtcatcacagtttcgcttgcgagatagtagctggcttaggaacttctggccagcttcctatacccagcttgctgataactttattcgtttcaacaagtcagggatatgatctggaggtggtttggattccgcggatatatcgctacgccgctaccggaggcgcctttagtcggtatcaaccgggcggttagagcggaaccatacaggctagcgaaataatgtgtttgtagagataggatgccttggttgccaagtgctgtcgtttcagcaatttggaaaggttgagttgaatgtagagatagcacgcttggtaagtccgtaagactcgcttgaaagatatcgacggtatgaggtagtgctgaagacgttagtctaagcgaagcttaccaagctgcgtcaagtactcagtggtctgttttgcgacgcgttctttatcgtccgatatcatctttagccaaatttcactgaatggttaacctcgaattcgtctagtaagaagaaaacttgccccattgtcttcttgccattcttcaatgatttggagtataggcattaaggtccttaacgccagaaacgtgatattggggacttcgaaatttggtagctcggtagaccgtcctttcaggatcaaattagagtctaaagaccatacccctcgattgctgaccccgtagaggaggttcacgtcactctggtaacgacacgcgtcttgacgtgtttgggactagctacacgccgaagaggtattttcggtggtcatttggtaaagaatcgattttttttttaaagggatgtcggattttggagtcaggagcatcaaaggctcttataatgagggccggggcgatcggcgcgacaaagtcatggtaaaacatgtatcatataggataatcattgaaccgtagaatgtcctcgccgatcgagtcgacacaaaaggccaacgagttgttgcctgggggtactggggcaccggtcgcatcgggccagctgcattgtcccgtgacagttcgttttccgtcgcaggcggtggaagatcccttggatgttaggatcaattttgtgtcgctcgttttattgctgatactactcccgacaagcgatggaggaaacaatcgtcgagctgtggcgtcagcttgaggaagagagacaagcacgagaataagaacggagggcgcgagcgagaagagccagagcagcccaacacactatttcgccttctcgatcgccgccaccactctttatctcaagcggttcgagttgagacggatgcgaccctcacggcccagggcgatgcgtctgcccctattaaccgactctatcccaaacgcattgttccttggcttgacttcccccgactccaagagcaactttgcgtcacatgccaactacagaaatccatttctttgaactgaaattccaggcaggggatcagcatttgaccctcgccgttaataatacaacttagcagagcgagcacttccagggcacgattccagcaatattttcagagagcgtgtcttgggcctatctacgttctagacccatgagataatttatcgctatctgtgccccgcgtacgcaatagcccatactaacagacatctcatcaggaatgtcgacgaactgtccgatcatggccatattcttcattccgtctggaatgactgcaggcctgtcgtaatagtcccgccgcaacagaggcgccgacttacgaggcatcacacaggggatggtgatcgaatcctggagtatctcgctcgggaattggaggtggtgcaaaatctcagtcataatttccttgccggagcacttgagcattggcttcctgacatggtccccttctttctctgggaatgccgcgtagccccagaacacctgcacgtcgaccggctggtcagaaaacatgggctgttgcggcaggtagaggtttagcaaccagttgctgttttgaagggtgacaaatgtcccagtgcccggctcgtcacctgtcagctggatgaaactctcaaagaatcgcgtatttttgagcgtcacagtgaatgactcttgtcgggattcacacatacgagtgcaaaagttatatgcgttgccaaatttcgaatcttttgtcgacagctctagccacaagagccagttctcgtccaggtcctgatcgatctctatcaactcaagtgatggtggggagttgttcgtcccggtagttgcgccagacatcactgagcctgccgatacaacgacaatatcctgctgcccgacttcaatccttctctccggttcattgtccttgacagcgcagatggtggacacctgttggtgtgatggatcgataccgatatccgtcacagtcgtgcgaaaacgaaagtcaacgccacgagacaccaggaaatgagctataggttcgataatagcctcgtgggggttgtagcgaccgacgtcgagctggcgcggatgatctaatttgtgggtatctttcatgaacccctgtacatatcgacggaattccacgaggctgtgccatggctggaaaccgaacctattatcagagacatcgtcagtttagtgattggtagattcttccatctatcaacgatacatacgttgtcgctaataacagccagtacttgctctcgaaaaagcctttgtggaaataatcactaatacgagatcgcgatagactcttctccgatttgaaacccagcgtgaccagatccatgtggtctcttagtcccagcccaatgtttttaccgttttgccgttccatgcaggagggttttcggacgagaaatcttgtattagggggttttccaggtggttgtgagtggttgaattcaatcatttcgtctaggacggtcttatttgggtccgtcttcgaaggtaccagcgaaaaaagccgctccatgcaactatcattgagggatggcatggaaccagcctggtagtgataaccattgactgaatcgccagaggtgacagagtcccctccagcaaactccaatcgttcgaggatatggatccgtgagggtggaacactagcctcttgaatgagatgtactgcggctgttagagaggcgatcccactgccaaggatccaggcgtccagattgtttggatcccgtttctctgatagttggttcatggcgatgttaggaatggttgcattgaatttgcatgaatgacagaacaaacatgttgcgccaggaaccaatggtttaaaagcccttgatggtccaagatgtgttgttgtagatgatgtcatttagacttgcggagtccttcctcttcgcgctgggatgtgcgttagctgaagcggccgctcagtacccatggtccacggatcgatccaacgttttgaggtggccaggcctcaatgggtgaccttatttcaattgctatcacgaatgtaagttagtcgtgtgcaagtcaatttattgacgtcatactctcaccaccgtcgtttccgtgtcttcagcgtgcgatctcggaacatgctaatatttttcgtaacaatcaaaggtcaatattttttacaattaactaaatcaattgttaatctgattgttcttcgggttgtttggtctaatcagaaagactaatcccttgggtccgaagcccaactgtctctgcacgagggtgagaaatttgaaaatggatcagaataaagagtttttcctaatattgtacatggaccttcaaacaacaagggctcaggagctcgtgggtaggaccaaaggagggaaagagttttattagggataggagagctcccgactgtctacctacctatgtatgaggtcacaccacaacattggcaagatttgtttcaagttcctttgccttctgactcaagtaggcaccatcggccttgacgtgaccagcctggccaaccataccagcaaatataataattgtggccttcaggtctgcaagatgtgtctgtatcaacattcttgcaacccttgttccaaaatcccctgatatttggtactggcctaagcgaacctctgccgaaatgcatccttttccaaacgcgcagatagaaacacgagtccattccaacaaacgtgccaggaccatattgaccaggagaagcgcttgtggatctcgcatgcaatggtgacaattgaagagagagcgcatggatggaataatccgctgcgactgcgtcaggagcatatcgatggcccgtgcctgttctgacgtttgaggaatggcttggagtgtgcaaaggtgattacttagtgttacaaagcaaccgccggatcgggagtgatgacatggattccccagtagacatgatccagaatgatcggaaagaaatgcatggttgggcctatcattgatagtgttgcatcttaatgattttggggagtatgggaaatggaagggaaatcccatttcagttgcttgtgcgttgtggaacactgcctcttcgtagccaaggttgctgcagttcaagatttttcccgatctggttgatatttctttctcacgcggtgttcctattttctgtcaatgccgtgtatttggcgggatgcttgcccatcagaggggggtaataccagtcaaaccaccgggtagttggaaacaatgctatcgacacccagtaatattagtctcctggggaaaatgaaatgcaaggacagatcagtgtacattatcaatggattcacctgggatagtgggtagccaatcctccatgcagccaaggccactttcaggcgaaatcaattcttgaaagggaagagattctggattgaaagtggatgaaccttggctgtcaagtgtaattcctacattggatggcgatggtagtggactaaataccgagtcttcgtcacaggaaggtagtggtgggatcgccggggtgctgtcgctggttggtggcggtgtatggatcgttaggtcatgcttctccattgactctttcccctgccgtagacgctcgattgtctttttattcatactgcctcttggctttcctatctttgctttcaaactatagtgacactccaggttgctgttgagagcggggggtggagaattagcaacatatcggatattccaagaagaaagacttactctccagaacaccgtgcgcagggcaaattccccgtgcagcgtactttggctgcatggcatccatcacaagcactgcgaagccttgaagggttcttttctaattgcttggatttccgtatcttgtcatttggcttgattggggaagttgtaccttcacagccaaccagaacagaagtttgagacatcagatttaacgcagagcaaacaatcgagggaaccagtagcctttacctattgcgaaatttgatgtaataagacgcgatggtggctgctggaggcttataagtctgacgttttcttcacaaaactatcggcaactctacaacggtactcccgccttctggcgtccacgaattgcctaattgggcttagaaatgcctccccaaactgttttcgacccattcaatctcatttgacttgtttcataaccgaaaaaatgggggcccaaagctaatcgatatctatctatggatgctcgggcagggcactagggagatggaaccaacccaattcttatatttacgagtcattcttattgacttttgtgcattcttcaaaccactagttatgtgggagtcggataattcgcttttacggtgagagtgtaccaacccgggcactggcttggctgatgttcaagtaaataagccaatgcccacaaatggatacataatgcaggtatagtgtgtgaatttgaatgaggagtagaagagtggaccagctcccaaggtactagccactgggctttatgggctttatctgccatggcccgtctccaaggtcccaacatcccgcagccaccggactttagtcgactttgactgtctccaaggtcctaacagttcgcagttactggacttcattcgatttaggccgtccccaaggtcctaatagcccgcagccaccatgaagtatagcaacgtcaaatgaaacacaccaaatgaagtccacgtgcgcgagtcaaaaacgggtcaaaacgtggaggctaccccgtccagtcaaagagtgaagttcctgaaagagttgattgggttcgcttatcggcagtccttccatgtaccgaaagtgaagaatatggagacaataaaagctaagcccatgtgctttcgcatcgcttgatgccctctggaagattatttcgctgcacttgagcgaattcgattctactcgtcgcattccagcttctagtgaaatgtcaaataacccaatatggtattttgcctatggctccaacatgctttcggatgtcttcatcacgcgaagaaaaatccagcctctcagatccgaagttgctctggttaaactgcaaaccctctgtttcaacataatgggcgttccgtacaccgatcctgccatggggggcttgcgcccagctgaggaacaagatattccggtatatggcattgcgtacctattgtctcccgacgatatgaggaaggtgatcatcagcgaggggtatgcaaattctagaatcctaggcgcatgactagctgaagtatatctaacaccgtagcagaggtggaatcgcctacaaagccgaggtgtttacagccacgttgcaaaatgatgcgtcagaagtgagtgttcatttattggtgggaagacacagtatctcaagaagctacgagaggcttccatcaagaagatatatggtaaatttatcccattacctcgttgcatggttctggtctaacttaaattcacaggatctgttgattcgaggtgcccgtgaacattctctcccggagtcttaccagaagagacttttgtcacagcaaacattcattccggggcaaagttgtcgattcaaggttggaaaatggctatttgacggattctggcaacggatcgcatactggattgaaaaaggagtttacaaattcaaagatggcgaagggaacgttccaccgtggttcctagtcatcttcgattttctcttatggattatgtggtattaccatgactacgtccacagcgtcatttggggcaggggtgatggattgaataggaaatagaccagtgaaataaggaatagattttgacagaagatcaagattcaaattcacttgcttttctccggtatgagggctctaggcaaatccatctctgcatcaggataagcccctctcacaacacctcggaatttctcgttccacagttgcttcactccatcctgcatgattggtacttgagatttgtttgaagctgattgcacttccacatcgttcaatacacggatcacattaagccctatgatcttttccacatccgatcgggcaatcccacgctccagcattctgcgaaccaaatgaggatatcgagcgacattctcaattccttttacagcattaaacataccgtcatagtcagatccaagcccaacatgatcgtagccaatattttgtccaacatgcataatgtgatcaatgacatggtccatgttcccttgggtgggatcaatgtgagcaagagagggaataaatgtgatcataatcactcccttgttggcttttagtttctcgagaatagcgtcggggacattgcgaggatgtggaacgatggaggatctgtacgcttaaggttcagatgggactttcttttgcagcagtctggctgagaaatcgcttgggataacttacgtcgacgagtgagagaaaatcacaggcgctttggaaatatccaacacttggtgcatcacagattcgcttgtatgggagaggtcaatgatcctaattctggttagctttgtgacttttgcgggagaatatatgttgacaagatcattcttacattccaattctgttcatttccctgactatcaattcgcccttagaagatagtccgtcatgtgctggagatattgcggtctagtcattttagctcctgtcacttgttcgttaattggttatcactcactgcgctatctgcgtacagattattcttattgtgcgctaatgtgacatatcggactccaagtttatgatacaaccgaagaacactggagctgtttgcaatctgatggagcccttcgacgccgattaggctagcaaatttcccatcagtgaacaagcgcatgatatcggaggcacgatcaacgagacccatgtggtctgaatacaaatccaccagtcgatgcactagatcgatttgctgcagtgtatctctcaacgtctctaggtgtgccgcatcgtcggtgaagtcgtctgagtctgggctaagaatatcatcagctgaagacaatattgtaggtcgcggtatccaggctaccagtctatgtaaacactccagaaggcaccaccagatttcccttctctgagtcgcttgaaatcaacatgtcccactaggtccttttccggatccaaccgaatatccagttgattgtcgtaaaacccgcgaatgaggtgtggccagtcgttgtgtccatctaggtggattgtcagccttggggtctcgaacatagcccactagcaggacacacaccaatcagtgggactgaattcaggatatcgatggcctcctccatagacatgctcgtggagactagctataattagccaagcgtcgaatgatcccaaggtccgagagcaacaagtgcatgaaagagattattgatcggcaagagaagcaaatgaaagaaaccagagggagtaatatatttcaaaggatcaaggaaatatttgtcaatagtctccgacaaagtctccggggtcgaagactagactgcttcccaaggtactcactcgtgttatatggtgaggccgaagggattgtcaatgctagaccaaaattcttcatccgtccttttccaaattcatctgattttcgtctgtccagtgggagaatatcagggcccctcacgatgacactgaaaaaatgggtgccaccgttccacctaggtgaacggttgggccctaagaccaatcttcgtctcattcttatgacaacaaccctcgtcaactttttggatctttttcaactctcggcagtgctctttggtctcccagacattgaaaaggcgttaggttttactagcgaggatatcaactgggtgcttattgtttacaacattaccttcgccgctttcctcctcatcggggggcagttaggccagagattcggtctggagaagacattcatttccggagcagcaattcttacggtgtccaatatcatcaacacagcggcgccaaacaaggcggctcttcttgccggtcgggcaatttcagggattggggcgggattgactgtgagttgtcgagcacgttgaaatgctccgttgcactgatctaataagtatttcgacttttctcaaggcaccgaacggacttgctatcctgagtagaacctttcccgatggcgatgctcgaaacaaagcactagcaatctacacagcttgcgccccattaggatctaccattggcactgttgttggttcccttctctcatgtatgtcttacagtccttcctcgccagcaattgaattttctgactggaagatctttagcgtctgacgccggctggagatctatattctggctgtgtctaattctcaccggtctggcacttgtgctagcttgcctatttttaccaccctttgccaagacaaacgacactccaatcgatataatggggagtgtagtctttgtgattggaatcgctctactagtgtatggtctgaatgatagcccaagaagtgggtggtcttcagcacctgtccttgtaggtatcattctaggagtgtgcctattaggtgccttcgtctttattgagatgaaagttgccaacccatgcattccaccatatgtttggaaaagcctccctttcttcctcatgcttgtcgctatctttgcttttggtggcagttttagttcgtggttcttcattactacacaactctgtgtcaatctactaggctacacaccggttctcactgcggtttattttttggtaagtctctcgacctcactccaactccactctgctccaagtcaaatattattgatgcagaagcttccattttgattggtacctggctgacgcgcgtcattgaatagcctggtgcattctcagccattgtcggcggagctctatcggcacccatgatcaagcttaccggggagaagatgactctggtaattgggcttgctattacagcggccggtgctgtagcttgggtatttgcaactcctgaccttgcagggggaactggccatggtgagggatactggtactccattgtggctgcaatcatctttgtctgtggcagccctgttgcgatggttccagcccaaagcattctgcttcgtcaggtcgaagcatccaaccatgctatggctagcgcactgttcaacactgcttaccaagtcggggccagcgttcttctagccggtgccaatgccttcatgaatggaaatcgcaagcccattaatggcatcatgatggtctccatgactggatatcaaaacgcattttggcttcttaccggagtccttggaggtgcagcactcgccatagctgtggcttactggcctcaaaaaacagatcaacagccagaaagccttatggaagaatcgaacccagatgaggagcaacaaataatgaaggctcagtgaatcatatgacgcgctggatcaccacaccagatatcttaatttttacaatcctacttgtcagtcaagtgatttatatctgttcatttttctttcttttttatgttcgccctttatcatattagttgaaaattctttcgtgcatctcaagcggctatctctcgatattttctcgagccactagttcctctgtcatccatacccatttccaatgttccctgtatgtacgatcatttaaatatactatggcggggcttcacatgtgggtagaggtctacgggattacgctattgtgcaacagaagtttaaactaaattgctgatgatatccaacccgggcggtaaattggcaaagtaacaaaggcttgaaagccacaaagggacaatggaggtcttccagcccaaatgaagaaaggcaaatccccggtgtcaacccaataatatcaatttgtaggcgtttgtttagaacgccatgttgcgaagttataatcccttagaacttaggcaagattcttcgattgtcaggaccgaagttctcactttccaagaatcctcaagctttcttcgcccaagcgagatgatagtggtagacatttccaacattgcgaagctcgatctccaattcattgcgaagggtatcaaattcctcgctcttaggttgtcccggcttccctattataatgtaattcgggttagtacctaaatatatggacagttcatgggtttgtgatcaacataccactcagcattcttttcattccatcaagcagatgaagcaaaacaaccacagccctctcgccttgctctggatcctctgatgcggctccaaccttgatgacctgaacactttcttggatgtccacagcaccagcaccctgtaaccattgtactaggaacgatcccgggctcggctggttccctatggctgcccaagcattgaccatgatgtcacggaacttgacgaatgctgcatgctcaggcccctcctgaatcgaaagcatgttcccttcatgcaactcaatccaaccgccgggcttgacacacgagaacaacagcttgacagcctcctgggcagtttgatcggaggcgactgtaagaacaaagcgctgatggaccacatcaaagctgttttgaaagtcggcaggccaagggtcgaatattgagtgaagtgaaagatgtaaattcgaaggccgcaaattctccgggaggaagtgctggggggcgatgtcggtgccataaagtgatgtcgacggggggaccgattgggccagatccatcaaccatgtgccctcggcggtggcggagtccaggatacgaaggtttggctgcttgatatccacagggcaatacagaagctttccattcattgcagtcttcacgagctcatgttgagttcgtaggcgatcgtactcaccctggtggcggggaccccgataggtgtctggagggttggattgtgtcattttgtgctataaaagaagaagatgaaatggcgagagtgaattctatgattagagcgagaaaagagatcgacattgaagacagacgctgctttttaggaactttcatatggtttgaaactcagacacatttcggcgactatcactcaatcgaatgtagagaaaaacatactcgccgaggctagtataagaagcacacgacacatgaaaggcccagaatgagctgtaatcattcaatcgtttcttaattttctcttcgcttgtccagttgcaattgattgccatacgtgatgtcccagccaagcgaagatctatccgtgcggcctcaaatccccgatgacaagctagtcttgtacgtcaaaaaatgtaagaaagtccaacactacggtcaaaatccatggcgaaatccagtcaattgatcttgtatcccttcatttatgatcgggatgagccttggtcttcccacttttacggctactaactgcctacagcgagtcccacatccacggccaacgccgtgaagccgctgatgctcattcaggccctgaaaattcctcacgaacttcatatcatcaattcaaccagcaacgaaacatggtttcactcgatcaacccttataagatggtccccgccatggaggacgtcgaaatttaccaggtcaacggcaagccgcagcggctgaacattttcgatagctctgcatgtctaacttacctggcggagaagtacgaccaagagggactttacaatggcaaagacctctgtgaacgaaccattgtcatgaactggttgatgtcctacactgcggggttgggtgcaaccggcaagatttggcttttgatgaaagcaccgaagccagtggatattggcgaatctctttcggtgttgctgaaatacatttgcaccgagtatcagttcctggaaactcggctgaatgaacctggccagcattacatagctttgcccgacagaccgaccattgcggactttgccatcttgcctcttgcgaatgaaactatcgcaacgtccgccaagctggactttggccaatggccaaaattgaaggagtggagtgagaagatgagagagctaccgccggtcaaggaggctttgaatagaatctctcggattggattatccgatgaagagctcatggagctggatcgcaaagattagaactctattgctgtgttcaattagtactccgtatttaaatctcattgacaaggccaggcgcttgagaatatctttcccttcgttattctgtagtcttgggcctactgcatagggacagaaccaaaaggcagaccaaaaggcagactataaggcagaggaaatttgttttcctgttgggatcacgtgatatgcgtcatgtgctcccgagagctttgcagggtttgcatattctcaaggcctgaggcatgaacgcggcacttttggccaggttgatctgccgagcaaatgcttccggggcttcaatgaggatgcatcctaatccggaccatcgacttctctcaccctactccgtactctctctgacttatgaataccaacctcagatggtttgtcttcgtggccctcaaacatttaaaccatcgacgttcttcatttcccttcgttctccttcatacttttcatctatccacatttgacctttcttcgccatcaaaatagtaaaatggactatacttcaacgtccgctgaagaagggcagaggcatctgctccctagaccaagggagggtattcactttttttagatggaattgtacatagatcagtatgtgtaaagaaatatatcatagtacatttgaatgtcaaaacaaatatataattatatatgatgtgaatctggtctatatcaggatggaaaactaacgatatatacactactggagtatcaaattgaactgcaactaaaagagagtcgaagaaatagatggaaatggacaggaaggacttttgaaaatgtgttgttatggttcttatgctcttaggaaaagatcaaagaactgtatggtcgattgtgaaagaaaattacagtggtgtaggtcgaggttgatcgttcattcccttgtccctccagcacacaggtttcttttttttccctaaaaaaggaatagaaaaagtaagatagagtaaggtcgaacgttcaagacagaaaaggagcattattattttaggaaaagaagataacagaatcaatgtattaatggtatgaagaacagcatataacagaaggcggtgaagatgaaatttggtggggaaagaggcagaataactacctggaagcggtgaacgacacaaacgtcctgggcttgccgttctagagaagatccagtgcgatcaaaacggtgttactttgagaaggcaattgctgaggatgtacgttactaggtgtcactacctgaggcatcaactatagcaatgagtttacagaaagctttgtatgtgaatttaccattttctcattgcttcattttcttggctttaggataacacgcgcattggcaataggaacccacgtatcctgaatgggttgcgagctccatgtcttcttggcatctaaccttggtaagtcaatctcgtaccgatttagtaagtggtagacgaaatgtttcaacatagcctcagcaaagtgttgtccaaggcacctccttgttccaaatccaaatgtgaagaggttgtaacggagctaggcagtatgattagcaaaattacaaagtaagctcgtctatcacttctcacctccgttgaagacagatgctgaaaccgatgtggattgaagcgagaatgatcgttcccccaaaatttctggttgtagttgattgcaagtgtatccacaacaacgctcgtctaatgtccaaattagccttcttatttaggtgtgatctggatagaactaacgtgtgatggaataatatagccaccaatgatttttgttcgtggtgagctttcggggatcgtgaatactggtcacaatcagtcagcaagtatcgactggttcttgaaggaacacctcacttgtaaaagggcgaagcctagctgattccaaaaagcaaaattgcaacagcgtatctttcctaccacagagctctgcgagagacccgggatttgccgaaatttccgcccgaacttgttgctgtatgtcaatatcttcagctaagaagatgataagccagctaagaacgtgtgtggacacgtccaagttggcgaaaagcatttcactaagagtctgaagtatctgtgatccagtcagagtccgtgaaggaagtcagaagatcggtcatctcacctcattcatcgaaatacagcccttttccatcgccatccaagcctcaacgataggtggctggtggttatttgagagagctcttgaatttacaagtctctggttgaaattttgccattggttttggaaactcctcaatcgtcggaatgagtgtggcctcatccactgacacaatccgaagcgatacactccaccggaaagaacattccccataagtgcaaggctttgttgacccagattccacagctcttccttttcattttcagtcaaaggcccatagagatattcggcggtagtcatgaacggaaagcgcgagaaatcactggcggcgtgtacctcaaaggactcagcatcctgtctctcaaggctctgcaagtatccagttgccgcgagctcaatatggctagatattgatgacacggagcgatgaatgaaatggtgcttaaactgagcccgaacttgttcccaacggtccccgttgatgaggcccatacagtcaccaagaagctcatggaataaccatccgccgttgctggacttggatttcaggtgggaaggagagtcgctgtgaaagatcttgacgtcgtcgggtctcgtgattacactgtaaaaggtcaatattctgtcatctctctatatcatcgctgaaacacttgcacttcggggagaacgcccgaccagatgcgatagactggcccatattgacgccattctaggctggcttcacgtccccggagaaatttatcgagacattgcccatcactatatttccatcttgggcctttaatattctgcccatgctcatttcgaaggggatacaacaccgtcgatatctgggatttcaaaaaggtgagttgcaaaaatcggtcattatgtcttagggcagaattctcacaattctatcaataacatgatctttcctttggtaaagcttccatattattactataccgaggaaaaggtaaataatccgagggttgaagaattccatagcgaaagatccgccacgttgagaaggtaattcgcgaaaagtgttgcgatacaattggccatgcgcgatgcccatgggataagtttcgattaggaaagatctccaaatgctatgtgtctagtccgtaaggtactccattaaaaccacacttcaacgaatattctccgaatcgttgattacaagcatcactttgccggggaataaatgatcccgagatcaacgatcggccagtaaaaacaaatagagttttattttcactaccaagaggataaagccctaagctcattttggtgctgatatactatttctagagccgttggatttatcctacattgttgctacaaaggtactcatgttgacgtctggatctcagtctacaaaacacaattcagtcgcccaaaagacaatgagaagcccttgaaaagaaattctaaagatctaggatatttatactttagccctagagttataatatacagcacacatacattagataacttttagagtatcttccattcgactaggtacacagggatggaaagtcttcacggctaatcaacgacaatttccctagtaattcaatgcttgcttcctgggtcagtcttgacattttcaacctcggattgatagtaaatttccggattaaagtaggcagtcacattccattgtccttgatcggaagcccagcaaatgtaggtatgaaatcctagtccatcggcaagatcgcggtgtttactgtgagacaactaatcagtgacttgatctcaaacgcaatcgcatcattcgctcaacttaccatagctttttaaccccatcataataagatcctgtcgctagtgtcctcccacggcgggcaaggtattctgaaagtcctcgggcaatctgctcgtcattttttgcatagtgtcgaacgggcagatatgccttcgacttaggaatcttcgcaccccgttttagctcaaagtagtatagaataccgccggtgcgatgctccttttcacttagaggctgatcgtcaagatactccgcggggtttagatcaaaaaccgagcaccaaagctcccgtagagagtccagctcatcttgtgttttaggggcccttccacctaaacttaacatctcaattacacttttcaaggtcgtgaaaggtgatcgaacgtatattttcaatcgagactgggatgggtccaaacaatcgatggccacgatttcggcgactggtcgcaagttatccgggaatgagtcgagaaattcgttgaagatataaattgaatctagcaacccctttgcgggtgcagggagcttttgaaaagcgtctcgaatgacagaaatctttgtcttctcttcttctaaagctttccacccaggcaagtagtattgtttgacaacaatagacttttccagtagatcaaaggccatgaagctttgtgattgtggaggaagcgatttttgatgttcccttctggccggttcgtttcttgacagcagcaaactttggagatggcggtggagatataaatctaagtcattggtcaaacagagagcatctccaagtaggcgctgactggcggctgtattgataggatcgacttcctgcccagcagacgggccaattggttctaccgaatatcgaaccgtaggggttgctagcgatgtagaccagcaccagcttagctcgactggggtatgatcatccgtcatgaagctcttccagctgtcgggggggccacatcctttaggatgggaacccaatgatcgtgccactgactcccgaaagaattttgtgtgaagcgactcggagtccgaaggatagcccgccataaccaacatgctctggagcatggagccgacatcctctacccataacgatatgtcgtcggcggaatgcttgatggtgtcttcctcagttgtaccctgtcgggatagttaataacttgggccattttcttcacaaaggtacccacacaccttcacgtcttctagtgtccatttccacttaaaaggccaagccctgatataggtcagttctcttcacttcattgctgttgctagttaggacagtcactcacaagaagtttaatagagtgagagccataatattgctctaaagttaccgattttgaaaaggcttctattacccttgggacaacaatcaaaggtaacttatacacaatgaagattcagcaacttcatataatgtcttcggggtattatatcagggctagagatctctgggtggggcatagggtaagccggagtggctcggcgactaagtagcaagtatgtctatcttggtatgtagacctttccgagacggctgagtattcggcccttaagctgttacgaccagaagccctgaatagtgatccacatagtggcaattttgaatcatgtactgtacttcaatcctgtgaagatacacagaagtctttacgacgttgactagtaggaaaatggcgtcaagaatttccgatcggtgcaaaaagcgaaatgctaccatcatacctagtctcataggccagcatgatgctgttctcagcggggacacgactacaattgacctcagtacggcggaaaactgggcgaccaagacaaagttgctgcaaggcctcgaaggggtattcagtggcctgtccgagaatgtatgattgccaaatccccgcaaagtcaccatctttagcatactcacgcctgtcgtcaggatttggcctactcatctggcattggtggttgtcctactacgcgacaactcattgcagacttgattaatgaccgctttcaaccatcaatccccgttgaaaactctcatgtcgtcttagcggcagggggaagcttcgctttgacagcacttattgagcaaatctgcgatcccggagatggaattctcattgcgacaccatactgggccggtctcgacatttccatcagtgttcacgcccatgccacagttgtgcccgtccatataccgttgatcgatttcttcagcacgaatagcatctcacattatgaatcggcgctggaaatatcttcaagtcctatcaaggcagtgctagtctgcaacccccacaacccgttgggtcagtgttacccactggagactttagacgctttgctcgagttttgcaagcgccatgagctgcactatatttcagacgaagtatacgctctctccgcgcaccagccatttccgggcggtttccatccatttgtatcagcacttcaaaggggggatcgtgaaacgagggctcaggttcatgtcatatacagcctcagcaaagatttcggctgcaatggaattcgcatcgtgagtggctctttggtgataccagcgaagcaagaatccatggacattactaaaaagacattaaatgcagggggcgttgattactcaattcaacgatgctgtgcgccttagtagcgctttaagcgttcacagtcaagtgtcctcgctgtcgacggtgctggcatcaaagacgatactgcagcccaccaacatcgacacagcaataagctatggggctcaaagtctgatggggtcctataaagtgattcaatccttcctggagaatgctggaatggagtatataccagtagcctttggtatgtttgtatttagtaggcttggcagagtcagcaacttcgatgcagagagaaagctgctgagatgtttgaagtccagaggcgtatctgtgtcatctgggtcaagttatcatttccaggagcctggttggttccgcatatgctatgcagttcccagtgatcagttggaagagggtctcaggagaattggtcttgggattcaggatttccatcagacattcaacgtggacgaacaatgactgcgccggcttagaatgaacttgaaaattgaagcactagaattacatgagttttctcttccacttaatctaaattatttaaatcggtgcgtttagtggtcctgcaaacagacaaggcagaaaataaatcagtctcacatctttcagagcttcctatgtaatgataaacgagttgaaaactattatacagctgacaaaatcttcatcatcgtctgcgcgatgatagcaacggtttccgaagaaaccatatcttccatatattcaaagtcgcacgtcgtatgttgtttctcttcggtgaactcaatcagaagtgggaactttgcacctgttgttttcaacactccagattccacctcgacgccagggagtgaaagattgtttgcgttggagtcctcctttctgttatacacaaccatcacttggaagatttcgtcttctccagcaatcttccgaatgtctttgagaggaattgagtgcatcagcgcattttgtatcgatgttcgcaccgtttttatcagactttcaaattcgttcaaacttccatcgacgcgcactggtaggcggtcaaggaagcagcccagaaggctttcggtgccaggctcagtgcgatcaacatgcggtatgccaacgatgacatctcgggtcccttgaacatttgcaatcgcttttgcaacgagagcgacatagacttccatagatccaaagaagcttggtgaggttctcagtacaatagactgtgagtttccggcataggttctcgaaccctgcccaagcgattcaaatggagggctgggtaaattcagtaggtggtctcgccagtatggagcatgtttggacagcggtggttggttatacttctgccattgagcccaaatggtgtaatctggagtctcatgtgcaggagaggtgacatctgtttgaggatcactttccagggaccggcgatactcttcctgtacctttttcagaagcaaatttatggatgccttgtcggtaaccgcgtgatgttgcacaataacaagatcgacccacgaaatgttttggttaatcatgattctggtcaatggaccagatgaaagatcgaattttcgattggcgaagctgctgattgggggattggggatcttgtccacgatcatctcggaggaatcatgagattggccacgtacgatttgaccatcgacatctttgaaacagcttttgagaactggttcactggaaataactttctcgatggctttctggaagaattccaggtgaaggtctcctttcagtcgcagatgagaggccacattgaaagcttgaggtgtgggcgacgaggccgacaagtggaaagcctcttcctcgatgttggaggtagctgtatatggtggcttagccgtttgccaggatgaagagaaagaccgctgggtatacaactggtcttcatcagatatatgatcagttatctctttgcacaacgccgacagcacggtgttgaagataaagagccccatcggcagctttgtgttcagtattctactggcaatctgagcagcttttatctgggaaagggaattgcctcccagtgccaaaaactccgactcttcgccaatttcgacagtttcaggaaggccgattgcctcacgccaaacctgggctaccagagactgagtcggcgtcagtggatctgggctttgtcgtttttccagattcaaatgggactgcaatgccttgcggtcaagtttttggtttggcatcgttggtagaacagaaaatgccacgatggtcgaagggcaagcatatctgggaagcttcgttcggagggcctcgtgaagaccagggatattaatattatctggctcaacaaatgcaacaatgttatcgccactaacaagggccaccgcccggcgaatttctgcacagactgtgcgaatggcgttttcaacctcgctcaattcgacccggtagcctcttatcttgacctgattatcatatcgccccaaaaatttcggctccatatcctctgtccacacggcacagtccccagtgcgatacatgcggtgtccaggcacaaatggatccggaatgaagcgagtttgcgaaactgattgcatttcagctccgatgtaaccattagcaacttggatcccactcagacagatctcaccaggcacaccgatgggaactggctgatttcgcgaatcaagtaggtagactccaacgcgaggaatcgttcgccctaatgtgacttcttcatgtggactgagaagcttgaacaagcacccaatcgtgcactcgcatggcccatacgagttgtagacagctttagttcctgcccaacggtctgcaagaacttggggcaccgcttctccggcaaaaagaatggtgtcaatattcggatagtcagaaggttccaaaaccgagaggaaagacggtgtgatcatggtcgcgtcaacccgtgaaagatgggaaaatggatccactggatcggccaagacgagagtagctccatagcagagtgttccaaaaatctccgcctggttgacatcgaatccgggtgaaaacatttgtgagtgtcgtcgacctgggcgagcatccatgcgagcaggtccataagacaaatatgagaccactgctcgatgtgggatttgaacacccttgggaacgcctgtggatccggatgtgaatgtgatgtatgcaaaatcttctcccattgttactgtctcaagtcggggacacatagtcgggaccgtatcccccaggagttgatgcaacaggatattgtgttggaaaatatcttgaaatttagcctgacagttttcgttgggaaagatgcacagtttcaccctagccgacttaaccatgatgcgcattcgctcaatgggtaattttgtatcaagtgggacataaatagccccggatttgatcacagcaatgacggaaatgagccattcaatgccacggtcgctgattatcccaacagcatctccagggcaaacgctggctgcaattgttttggcaacataatttcccaattgatcgagctcccgatatgtgatactgcgagatgtggattcaattgccactgtatctggccacttatcgacaccaatctcaaaactgtccttgagattagatggtcccacatacgggctcataaaagtggatgaattggtagtcagggaaagaagctcagttggctccaacatccttccgcacacctgggatattgtctgacaaagcggatcaagcaatgcgacgaaaatgtttcggaaatgtatgatcatgcgctggattaccggtctagtatacattgtctggttgtataaaccatggaacgtgagacggcctccttctcgacggatgaggacggttaatccaaattctggaacgtcggtacgggagaatttccaagtggagtcttcaaagcctggcaagttgtactctaggaaaagggcggtctggtacaccctggtgtgacttccgggcataatggtctgcaatgcttcttgtgcagaccactggtgagaaccaatgtcaagcagcagggtctgcacgctcgaaaggaagttctgtttgcttttgtgatccaagaggctcattgggaaggggcaagtattcagcgtcgggcccacaagggagtcaatcccgtggagagggaagtcgcggcctgagaacacagttccaaacgtgatctgctcttgtgctgtataagaccgtagtagaagtgcccaagcagcatgtatcattgcagccgatgtaacattctgagttcgacatatctgctcaacttggtctaattcaagctcaacgttgacagtagtaataccaaaacgttgctcttccattccctcattcggcttaggaaggctcaatggcacagcatcggcgaccttggaaaatgcttccttccaaaaagccacttccttatcctgtggaagctgagacctttgtgataagcttcgcgagaactgccagaattgagcaggtgtgttcttcagggttccaccctccagaagcgtttgaacttgttcgatgatgttactcatagaccagccatcaatcaaactatgatgaacaagccatagcaaatgtgcattgctcttgctctcgttcacaagaaggcgaaaagtgttaagaggacggaagacattactataatcgacatgtcccgtgcttttcatcagctcgtcggagtgattcaggagagctaatggtgcatcttcatcagtcacaaaatgtgtttcccagtcatgatgataagtagaaccaactttctgtttcccctcagtgagatcaaaagtcgttctgaatatggaatgctgctctagaactgctttccaggcattgcagaatatgtcactgtattccgtggtggaattccaaggaaaggcgatggtgaccagcatatagctcgccgctgaaaacttaatggaagatcgaatcattcccatctgtgttgtcgtaattggggacgtaacggaggaatcgctatggacggtgtcccacaagggcgccaatggttcctcttccggcgcatcagctttttccaggagctcagacaggaggaccagagaaatcggtgtgaataacccctgaaagtccactgtgtaacctcctttcctgagaatcgacaatagtttgatagcaaggagagagtttccaccaagttcccagaagctgcaagaagtacccactgagccagtagaatgccccaatgcttcggcaaccgcttcttgaagaatttccaaccgagtgccgctcgtggtgttagaggaaaatttggtagaaatgctctcaaaagtgtctcgcaaccttttcaaatcgactttgccgttggaggtgcgatctagctctcggagggcgatgatctgatcaggaacaacgaactcatcatgtgacagagagagttgcagtcgcatctccgtgccgtcaatgctttcaggcgtgacagctgccaccaatctacctttgtacatcagggcggctgccgactgtacctcggggtaggaagtcaagatgggcagaacttccatgtcgatgttaatgagataacctcggtttttcaccatgctatcctcacgtccacagaatatgataccctctggtactctgtgagctcgatcaagggtccggtacaatcgacggcctttccaggtaacaaatctctctgcagtcaatgcttcgtttttgtagtacccagatgccaagccgggtccactaatacagatctctccttcgtcagattcttcgagatgttcgtcaaggatgagcatttttgtttttttcatcggtgttcctagaacaatcggatttccaggtcgcaactcagccatactggtacaaatagtggtttcggttggcccgtagcagttgaagattcgccggttcggactccaccatctctcgatcaaggctgaacttggagattcgccgccgagaaagatattcttggcccgggaataggcttgaggatcccccaatgtaataaggagcgaaggcgttgccggaaggattgtgcaatgtttcgcgtcctccaaaaccctttctggttcagacaggactaaatgacctccatggcagaggcaactgaaaaatacaccccaagcagctgcacaatagagcttggattagcatatcgtgacagagattccctggatttctcggttccacttaccatcaaaagcgaaagagaacaaaagcagaattttgtcgtctcgaccaactcccaagttgaaaggcatgcctctgtcccatccttgcagaacatagttctcaacacatcgacgtggaataacaacacctttcgggctcccggttgtccccgaagtgaagataatataggctggatgttcagaatcaccgggagtgtcgagatctctggtgattgttggaatttcggtctcggtaaatgaggcattgtaagtcaagcgaatggtatctgcttcaatcaccgagtaacgcgcagaattgagtcctgtcttttcagacttgaccacaacttttggctcgacggtttgcagaactgcatcgactctctgttggctccaagagctggcatccataggcaccaggcaggcacccagtcgcatcaacgccaaaatcgatgccacgctctccaaagatcttgagagaaatattgggattgaatctcctgtccggattccatgagaatcaaagagcgcggctaggaataatgaggctttgtcgagcttttcgtaggtcaagcttcggtttccttgagagacagcaatcgagttcggctgaacatcagcatttgccttgattagagcacatatcgaccgaagccggtggtcttcccccgaaacggctggtgactcgggtgtagcgtgtggtgtcatatttgataggcgggtcgatttccagtagacttgcgttgagaaaggctggggtcttagttaaaccctctgtattctggactttgccaaaatattactttgccaacggcgactaagcttcggcggatatttttcccaattagccggccaaggttctccaactaccgcgcgtgagcctttcgttcttttgacaagactccggtttataacaccgttcaaaatctccggcatacagtctcttttcagttcctaaaattatgtatcgtctggcagaaacacatcgaaagtccaacttgtcattcactattctaagtaggcctctaattcgtgtttaaccaaacagcggtttctgtccctgagcctccgccgcaatcgctgtggagactcccatcccagccagggagcccgaaaagatggcatggggaacatttttcatcagtccacagttgtcacctgccgcaaatacacccttgacggtggtttggtagaagggaggggctattttgatatcaccgctaggtgtcagctccaggccaagttgctctgcgaaagaaccgcggggttttgtatcgggagtgtgcgcaaggaatccctccgtcacgctacttccatcttcaaactcgagaagtatactcgccttctcgtcttgtttggacaggctcttgattttgcgagaatcgaccttcatgacagttgaggtcccaaatccttcgctcactgctttagcgagatcctcagagccgtttgtgtagattgtcacgctttgactaagtgttgatacctgtcgggcgacgtgcagggccgaggggggcttggaaagtccgccaatggcaagcacaccagcggaagtgcatcctcgctcttcgtagcctttacagaaaagacagtggaatctagtaggatgatcagtttaaatcggctcactatatctatgggtatgttggttgcatctcacattcccttgccccagcactcagcatagcccgggatatcggggaagacgtcctcgacaccgttgcacagaatgatcttttttccgttccacatgtttccagtctcatcggtcagagagaagcctcctgactcgtcctttcgcacgctagaaacggctttattcttgaactggacatggtcatagttcgagagaatattgttcctggctttctctcgatattccgagggtttaacatgatcaaatccaggaattaaatgcatatagtctgcggggtcatttcgataggttccagcatcgaaaacgattgaattctgttgttgacgagccagagtgagagccgcggtaaggcctgctgggccgctaccaatgatgagcgcgtctgctgaagttgccatttcggatattgagtttgacttggtgatcagaggaatttttcgtttggtgtacgatttttctgtcgagaatgtcagagagagctaacttcgtgctaccggcacatctatcaagtatggtccaagtggcaggattcggaggttaaaagccgacatagtgcccggcggacattaagttacgtaggatagccctcgatagctcccatttgtcaggttcatcgggcctatcgcatatgcgaggaatatctagcgcgcattgcacgtcaccaaggtccccgtaatctatccgaggtaggtaccttggacgacactgacatccaatcaagcatggcgtctctacttgggatttggattttctttgctgttcgctggtggtatatgctgctcacttctatagtatgaccgtgtcgagatttccgtcccgcccttagcgatattcatttgaacgcacctacttgccggtagtgtctagtttgtaatttttaatacgtggagttgtgtggttgaagaaccttggaatattattgacaggatttatcattctcatatatcgtatatgtgttctaaatgctaaagcaagcctttcaagattgcctgtctcacgttgtgctgtaattatctagcttcaggcttttggccccaaacgaaatacacattaagggcgacgtgatgttcgtccatctccttggcaaaccgctcgggcaaagtcttccattcttcttcagtcattccaatcatctcaggcctagatctcgttagatattgttttctttaaagcttccccagtgcgaacttacttggccaccgattggaagaatcccagaaccgacaacatgttgcgttttcctcgcgctccgagttcgggatcggaatttgaggagccagcaaccatttcaattgccttgtatcccacattcacgagtccttcgtcattcaatcgacccgcaagctttgttgaagcgagtgggtctgaaaccaccgtactggtcaatttatggaccgcctggacagccgggcatgactcgatgggcttggaaaccggagtctggaagtccatttcaacgagttgaatccaacctcccggcttcacgcagcgtatcaggttgcgaagtacgagtggaacttcttcggttttaaacaacgggatgacgaatcgttggtggacgaggtcgaaactgtctttccactcggcaggaaactcttcaaccaggttttgcttcacaatctggaattgagagctgtccttgagaggcggatatccttcgggacttcgaggtaccgattgtgagcttatcttatgcaagatatcatgacacaaggttggacttgtaacttacgcgttgtcaaagccaacaaactctgcatctttggggaaaatagacttgacatcctgcatccaataacctagagagtattagcatcatcaattcaacatgcagaaactggtccgataccatctgctgtggcggcgtcgagaactcgtaaacccgaacggttcaagtcaattggtgccaggatcaatccattggcacctcctttcagccactcgtgctggttttgcatccgctcagcttcctccaagttccgtggaaggaaatatctgcttccgacttcttcgacattcttatcaacggcctgggcttggctggagtctgtcatgatgctttgagttttttggttgatatcaagtttcgacaatttgtgacaagtcaagaaaccttttagtatagggagtgtgctaagttatataaatatttcatccatatcttaatatacaccacctattcagggtgctgtgggtacagcctcttagagccattatcgtaacgttcaccaggggatttggagaggccggagagtaatcggacccaaaaaaaagcatcttgaattctccgatatccatcaccttggccaatgtgtacagtggcttccagggagcggagaatattaaaggggtgagagtacccttgaggccaggcccgtagataactaagtcaccgaagctgagtcatcgatatcccttcccgcaaggttcggagcgggggtggggaagccccacttcgatgaatactaaccaatcagaaaggttggtactgccaaggtgctcgttcagaaattgtttgcactgtatgcaccgtttgccctgtttgtatgacgtctccgtgattcatctgagaatttctttcacatggatccaagtcatccgtccaacttcaaccgtctgacttccacgcacacaaacaccaacgggagcactcttcaattcagggaagccatctgcttcaaccgaggaagttttccatgcggtacagaacgaaactccagccagtgcttacgtgcctcgattctcaagttgtggtggagtgaacccgattgtccaaggatataccctacttcttctagggctcctctctcatcgtcgccatctcatctcgctgcaagacacaagtgcttgtgatgctccctcttgaggataaacctatccaagtgattcaaaatttatattatcgaaaatatgcccgccaaatttcaaatgaagatcatggatgcgttcagagactaatgcatcagcgcgggtgtttgttcagatgatatgggaagggcttgctcgacgtgctcgactactactttctttccactatcgatatagagcctctgcttcctgtgatcggaccttcgctcattcgaggtcagctccgagagcttcctgcagcttccacggaagagaatatctcatccagagagagaaagcagaacaaagaataaccttgcagaattactattcctctacctcatatgtgttgcttgcgtattctacctactttgaattcatttctattgcctagtacggcacccaaaatgggcgaaagaaaattcatacaaattatctggagataatgcatgtcccctatggcagaagtttcatttttcatgccgatcaccaccatgcctgccatcaacctatctaggaatgcaatttttgtatatatcctgacgtgcgctgaagtctcgaatggtaacacccaaagtaggttgcttctattaacgatacggtatgctacttttctcaaggctacagctagtttcaattcatctctttttggtcaattcgcgaataaagatcttcgcccccaaggtcttcaactttaagaatgatccacaaggtcccccgaagactaaaagatacctttctaattttttacatttcctttcgtttcttaaattaacaacatcaagtgtggcttgaattttgatatgtctaaatctccagagtgcaagtcccgtcatgctatggatatagatgccaatgagggttgcgacaacaggtattcttaccacaatcgaagaacgtatgttccctcaccccagttggatcttgaatttcctcgctggatcatttatttaacgagtcaatagagcggattttcgagtcttacccctcctagtattggggtttgctagctatcagcttgacagaaccaacattgccagcgcactcacagggaattttgcatcattcatatccgtcaaccaaaacattattaatttcggaaatcaactgatgttcctgggtgttattatacttgagattccatcaaatattattctacacaaggtatgtcgcatcaatttccggatgattccgtctgattgagttgaattagattgggcctcgccaatggatcagtggacaggtctgcatcttcggcataatcgcatgtttgcaaatatttgtgcgcaataagttgggcttcctactcactagaacatttttgggtcttgccgaagctgggtatatccccggtgcaatgtatactctttccacctggtataccaaggaagaattgacaaaacgtatcgccatattcttctttggtatgtttggcggaaccgctatttctccgcttcttggggctgcttttttgaaactggacgggaaaggtggtctctttggctggcaatggatcttcctcggtacgattggggctggtccctcaaacgtcgaaatatgctaacaaatatgtagtcgagggtttattctccgttgcggtatcattcgttctatttttctttcttcctgaacacaagaaagtccctgtgtcgaccgatgaagtgaacatttcggagtctggaggacttcgcctaacggagaaaccattggcccatcctggcaaaacgcacatatcacttagcttggtttggaagacattgacaagctttcaaaaatggccgcattttattgccacgggctgtgtcttcgctacctggagccctctgacaacatataccccaagcattttcatggaactggggtttccccgagttagggcaaatgcattgtgtgcaatcggaagtttgctcactctccccgtgattttggtttttgcgtggatcagcgacaaatcgaataagaggggccttaccgtcatcgttgctatcttcgtgtacttgatcgcgttggtaattctaagaatcgcagttcaccatgtggataaatggggcaagttcggcctctggacaacagtcaatgccctggctgtgggctatcatccaattcacaattcttggatccaaatcaactgcaagagctctgaagaaaggaatataagtgttgcgtgagtaaaacctgtcctattgggcgttcttcggacagatcagctaacactccttcaacatatagaatgtgtaagactactacctctatatcagacaggctttttctttactaactcaatgaagtcgtcatgtcagctacagcggggctcatggcaggaacccagatatttcgggcggacgagtcagctatattgtaagtcctatacttgcggattataccccattcgtaccactaatgctaaatctattaaccttgtagttatccaagaggggtgtcaattatgattggactactagttttgggactgattcttgtatccctacaaatctcgatattctggatcctaaacaggcgtatcaaagcaaaaactggcaacggggtcttgaacattctatagtggccaggatagcggtcttgtcgggtgacattctcacatatatgatcagatgcgatgtttaaaaatttacaattgactagtagttatgcagggataaatcgacttgaaccatctacgtacaagttctatattttggcttctaacctactcatggtttgggagtaattaggtttgtgcaggtaaacgacaacgtctcatattctataacgcaaaaggcatatgtttgatcctcgatatatacaaagaaaataaattatgcacaataatgcaacccagtactccagacctaacatgatatcgtgtcgtgcaaggccatcatgccaaatgcgaatccggaatccaaaagaaaagtcaaatattgcctttctgcttttcttttccaaaaaaaaaaaccttgaccctcatgcgttctctgcgtgtatggttccctctgacttccgaccgtaagggttctcatccgcaatccagtcctggtggcgttcgggaatctcgtagctgctgctcttccagggaacaaccttgttgacatacatccagtcaagctcctcaagtgtacggccctttccttcaataacgaagaaatagacgacgccgatagccacgaaaaggcaaccagcgaagacgtatccataggcaaagtcgatgtccttggtgatgaaagttgtgaaaaagctgatgaggaagttccacagccagttcgttgcagtagctaaggccatacccttggcacggtactttgaggggaagagctctgcgacaatcgcccaaaccatgggaccccaggtcatagcatatgccgcaatgaacaagcaagcgacgacaatcatacccttgccagcgttgggggtattggtaggtgtttccacatccagaacgaaatggccgatggatgagaagatcataaacatgataaacatccagatggctccgtagatcagggacttgcgacgaccgaaattttccacgacatataggccgccaaatgtagttccaaaattcacagcaccaaggatacactgggtcacgaagctgtccgagagaccagcgccttcgaagatagtggtaccctatcaaagaaatcggtgtcagcaattcctcgcaccaagatcccaaaatagaagaaaaggcttgtgtaggaacttacgtagtagaaaaagtagttagcaccgctgagctgctgcagtgactgcagaaccatgccaaggacaatacgatagaacatgcggggggcagtgaggaattcatcccacttctggccctcagactccgcttcaaactgctcacgaatctcgttcatttcttccaagatgcggacatggttctctgggatgccgtagagcttggccagggtgctttgggcactctcggcctttccgtggcgaaattcataacgtgggctttccgggaagaagatcataccgcctccgagaatcagagcgaagacgaaggtgataccgagagtgatacgccactgagcagtgccatccagagtgtgagtacccaggttgatgcagtaggccaagaaaatgccgagagtaacaaacagctggtagcaactgatcatggcaccccggatgtgacgaggtgcactttcaccctggtacatgggcacgagcagcgagcagccaccaacaccaagaccagtgacccagcggccaacaaccatctggtaccaatggccatcgggagaggtaatttgaacgatcaaaccgacgttgaggatcatacaccagagggtgatggaccacttccggcccaatttatcggcgacgggggctccgaccagggcaccgatcatggtaccgatggacaacaaggcgacaatgagaccggagcgcacggtgctgaatttataggaaccatcggcgccaagctcaccataccgctccaagtagttgctcatttcttggaagccagaaatctgacctgtgtcatatccaaacagcagaccacccatcgagacaaagagggccatcaccaaggaccgcatggttatccgagggattggggtatcgatacccacgggtcgcatgtgtttctccataggactattttgaggggacgactcgaggcttggctgttgagcctgtgtgatggactccccatggtgggggaacgattcggcacccatagtttaggttaggaaagaggaagtatgtatctgactgtcctgacgtgtgatatttcgagttgtatttaagagatacaatggactaggagaccagctcagaaggaatatgaagaagagtagaggaaaacaaacccatggggaagaagaaaactcggggaagatgggggaattgggggccttttgtaatccatcaatcaaagggtagagaagaaatttaaacccagagtcgaagtggggagagaattgtggagaggcaagttgcgcgagatgacgatgctcatggctaggtagtacttcatagtataaggtagggtggcagtcaacaatgcagcagcagacggctcgcacagccaccccaccaggggaggaagccatacagggcaggttccagtgattccaagtgggatagccgatgtggtcggcataggccggcaagtggcggattcaagcttataggccaaggccgtgccgaactaattcgggatcagatactttagtcggggccgagaaagagactgtacatcagttgctggatacggcgataaattttgaatctggagaaatcatccatggacagtggggcaaatagaaaacccggctaaccccaggccctcgggttctctccggatcgaagagaaattcatttcctaatcggtatgccggtgaaaacaggagaattatcatctccagacatgggggttaggggaaatgcggagtctggggatatgctacggagcaccaacctgagatattacgactacttcactagaataacattattccttgacaaatgccccatctcctccgtttaaaagcttataaataaagcctaatcccactatcaatcccaaacatcggcaaaataaacatcggcatcctcatgttgatatatcccgatgcgggggtccgtgggcgggtttacggggtcttacataatatcaagccccgcctgggcacacctttattgaattttcaattcatttccaattcaaatgctttctcgcacttttatttgtggcactattgattcttctaccgattgtcctctaactcataatatatgctacgggacaccatgcagtgacctctatcaactctaggactttgagaaatatgtgtgccccagttgtatacataagactgcgccttcccgatgccgacttccgaggtcgtcagtggcgggcatcggaggcgccacacccgttaccctaggtcttacgtcattgaagaattttcaattctttttttttatttgaccgtaattttcattgaattgataatctcgtacgtaatttacattaagctcataattttatgtaatttgcattaatttgaggatctgtttacggagtactccgtattccgtatgtattcctaacattacttcggggtacccaatatcgctttggcaacagcaatggcgtaaatctcgcctaaagcccaaacccataacgcatgccaatgcatccgcaacccaaattccggcatggcttttcctcatctcccaggtacggcggctcaaacgccttgaccaattgggacaagcgtggcaatttctccgcgtttgaattggtgcaggactttccccgcagttgcagttggtctatccagttctagataccccacatatgcaagtgggttggctcctagacgtcggtccctcgaaggctgaatcattggtatatcgcaagcagactaccgcctcgattattccgcggacgacacgggaggcttgcaccataagctcgatgggagcaatccgtggcctgatatatccttcagtcgatggaagaattttgatttcctaatccaaggtgggagttgatccccgtcttggacctcgatccccaagatatatatatgcattcattcattcaaagccagataacaagtgcactgcgaactctaggatcactatgaaaacactagcaatcttatcattgactagtctggtctctgccgaagctgctccctacgctcaatgtggtggaactggctattctggctccacaacatgtgtctctggctggacttgccaatatcagaatgactggtttagccaatgcctcgaatgtaagtgtgctcagatatgttccaatattgttcagtcgattgacacggaaaactccagattctggcagtggtaccaccactctatcggcaacgataagtacaactaagtcgacggctacaacaaaggtaaccgccaccagtactagtggggtggagttccccactataaatggactagaatttgaaattgatggaaagacaagctactttgccggttccaattcctactggattggcttcctcactaataatgacgatgtggatcttgtgttcgaccacatggatgaatctgggctccgaatcctccgagtttggggattcaacgatgtcaacactattccatcttcggggactgtttattatcaactactcaaagatggaactgccactatcaacaccggtgcagatggcctacagcgcctggattatgtggttacctccgccgaggcacggaatgtgaaactcgtcatcaattttgtcaacaactggtcggattatggaggtatggcggcctatgccactgctttcggtagcagccagacaacctggtatacaaatactgcagctcaaacagcctaccgggcttacatcaaagctgttgttgcccggtatatcaattcgcctgccgtctttgcatgggagttggccaatgagccccgctgcaatggctgtaacacttcggttctttacaactggatccagtctaccagtgcctatatcaagtctctagactcgaagcatatggttgccattggcgatggtatctaggcccgtaatatctctcccatcatccattgtctaactcatattatagaaggcttcggactggacactgggtctgatggcagctatccctacagctacggcgagggtttgaactttacgatgaatctagggattgataccatcgactttgctacattccatctctaccccacaagctgtatgtatatccttttcccatgacccttggtccagagctaatgtattcgcacaagggggaaccactaacgattggggcaatggatggatcacatcccacggagccgcctgtgcagcagctggcaagccatgtctctttgaagagtacggtgctacttccaatcactgtagcattgaggcaccatggcagaagacagcgttgaacaccactggaattgcagctgatctctactggcagtatggagacacgctgagctcgggaaaatcggccgatgatggaaacaccttctactatggcactagtgactttacctgtctggtgacggaccacgtcgcagccattgactcctagatggagcacggaaagagatacaaatccatgtcatcagccggcaccgatatactgttctgccaatctatgaattgtatgctctttgtcaagatttttgattatgatatgcaactcagcagaaataacggttttgatgtggggtatttatacatatgtacatgcaactcggtgcttttctagaattaattagattgggctagtttcaagagggtataaagggcttgatgtcgctatcgaaagacattttcaatgactggattccttcttggtgacttcagagtaggctgaaggttcaggggaggtatcatcctgctccacagcgtcggtagggggcccgcggtagttgttatagccccagacaccataccagagggcagcgatagcaatgaagccagcgaacaccacagatgcatagttcatgctctccttggtgacagttgtaagcgttggcatgcagaaaagaggaattgcaagaagactccagcctatgatagttgaagcggttagttgaaatccatatataaacagatggttttgttaaagcaactcaccaagagcaataacgttagcgatcaggccaaagactccaaagttgaagctaccgttcttaatatcctctcgaccacggaagatcagggagacggcgatcgggcaggcatagctcatggtcaagaaaatgacaccaacacccgaaaaggcattgtacgcagcagtggagccaaagtagatcacaccgagaagaatttcaacgaccattcccaataataaagaattgaaaggaatgtcaagggtcttgttgacagtgctccaccattttgatccgggaatgccgccgtcgcgggcaaaggcccaagtacagcgagaggtagcggtaacacaaccgacaccacaaatgatgcccagcacaagcagaggaattaacaaacagaatgtaccagctgagttgccaatggcggccttgaagatggcgggggtgggctggcccgaagccagattgaccaggtatgtgagatcgggaagcacgaagcagacggggatcaagaagaggagaccggcgataaagttgataatgatggttccgaccatggcctttgggaccatgatggcgggctcatggacctcctcgcagagactaacagagaccatatatcagcatgtggaacagccgacttggagaattcaaaggtgccaagactcacgagataatcatgccggtcgccgatgtggcgtaggcagcctgcaagagaccaatgaagaacgaccatcccgcgggccacccagcttgactttcaaagtgaccaaaaacccatgcggcattgtgacgcccttgcttggcgacagccaacaggcagacgacaatggcgagtagaccggccatagtccagaaaatagcgaatgtctaaaaatgatgatcatcagtatgattaccccacggggcaaaggggcacgtgcgacacatacctccaaccacggcaaccatttgttgccaaacgccgagatggagtgtgtcaggaaggtaatggccaagaagatcaggaagatatgccaggcctggaaatcatcggtgattccgacgcccggtgatttttcaaagacatccagacaggccacgaggagcagggcagttccaaaattgacagcgagggtaatggtgatgtttcctgcaacgtaggaccagccacagatccacgacgcaacgcgacgacaccacaagggcgacaagacaaaggtttgatagtagacaccacctgcagtcgggtagaccgaagtgatttccgccaatgagatagccacgcagagaatcaagaaagagatgatcacccaaccccagatgacattggccggcccacctgcggcgagtgggtagtatagagtggtcgacaagccatagggcactgaagagagaatgaagcacataaaggtgacttgccaaatcgatcgattgcgagccatctcaggcttgtatcccatatcctccagggtgcgatccgcattggtggtgctcacaccctgttcgacggtcaccccggagggatgactgaatccatcggcagccatagagagaatgaagttattgcgataggtttcggatctgcatacggtgcagattggttacatataatcgggacagtattcgagaatgggaacaagagagaaataagaaatataaaaacaaaaaggcagcaaataaagaaaaaacgaaaaaaaagaaaagcgccactccaacggcaaaacatggaaaaaaaaacccaaaagaaataatatgaccggcatatttaatgcaaggcgaatgaaatccaccccgatccacattgacccacccggctccacccaatccccacccgcatccacaggacacgagcgcgattaactttgagccagtcaatgcgcgtggagggacagggagattgttggcacggccaatcagactgcttctataatccaaaacacgactagtgcggtccttgtttcgaagctttcaagaaggaacaccggggggttgtggtctccgagctgacaaagaccagacggagccctaactaagagtacatacatacctggggctaacgggctggatattctgtcaacatcccctgacctaccaaggtactactccgtagttgtctcacctctaactctatacaaatacggagtccttagtgtggaaccacccgttgacatgatgtcggaggcgctggaggtgccaacttctgccagagccgaaatggtaaggcaaatgagaacctcatgattttaaatattggatgttttcgtatctacaatataggcatcagaggcccagattcagatagcaaccagaatggacgcccgtaataccttctccgtatacagttaaaagatccccctgattctacctgcttcccgatatcagccgtgttcccacaggccatcccgcaagtatagagatagcctcaattaaaagggggcacaggctttcggcgcaaatctttcattggccacggctatcttggctgcaaatttttactcaattcttacggtgtactccgcaggggcaagaagtatggcaattttcaaaattcacaaatcagatggtaacttggaatgctgagagttcaccttctgaaaagtctaggcagaaatcaaagtgcgcgctttctaattcccttccaatgaaaaacaccacagatatggggccgagagaatgtctaacatcatacggggtacgcatatccatagtcgcaacaaacgggtggcactactccgtacagtagttagcgacattgtggatgcctaaggtgtcggacctcggagcttttcaatgctgatattatttccgcatcttcgtgggccttcataacgtgcataacattattcattccacgccttctgaccctgtgtgaagaattccattgaagtcaaccctctggcgcccattcaggtccatggcttgctgccaagcgtgtcatacaccccaaagtactctttccagtgtctcgtctacgtcaaccatcacaatcatacagaggcgacgtatgcaacttgcgagccgtcattattacggcttcccaggattgatgtgttggtcgtgtagtgtgcagagctacctcgactgatacagaccgtacaaagccatatcaaattctatcctgcggtcgctaatttataaaatgcccaggtttagagcacaacccaacttttcaacaattcgactcatttctgcatgcgctaggaatctcgccctaggtgatatggatcttttgctccagtgaaacagatggatgacgacgtcgaactactgggacggtcggatttgtgcgcttcgtgtcggtctcggggcaggtggagacgagtgtgtccatgcttatagccttggatgggcaatcaaatgcagacaataggccttttatacagactgggttgtaaatttcgaacaatagtagatccggactctaaatgtcgaaggtttcgtctcggtccgcggtgggggatgtggggatcttgacatgagggagaaaattgtgggggaagccggggcttgaatttatatacggagtacatggactctctttgcacgacatttaaaatctatcattggattgcgaggataaaagctcgcctgggaatgacaagatatagagcaatcccatctcgcgaagtaaaatacttaccccctataggctctgcatgtgattctccacgtagatcctgatagcgttaacttaaactatattttgtaaatgtatcattgtatagcgatatcgctatatagattcatgctatatcaaaatgacgtcggtttcctaattgagcgccggcgttgaaaaagtcctatctcaaagtcgttcctcctattgtattctatccagcctccaacatcgctttatcaacatttcccaatctcaccatgacaatgaataatatattttcctctattgccacttccaccaaccatctcaaggccaaatatcatggtcatatccaagctaacagattcaaactgctgatacaagagctccaagaagcagaacagaccaaggatcaactcgactggatatctgaacatcgccaggagacaagacgggctaacaatatcatccaacgggaaatgtatgtgggtgcgacatatcgccgctatgaagcccaagtgcaggttgaaaccccgccagaaccttccaccttgaaaaagcttcaggggtgcaatgtcgagctcatgctactgaatattgaatacttccaacacctagagcgaatggcagaactccttgagcgcaagccatcgggatgcctcgtccatcgacatacaaaaaatctgcggcacaaatccaaacagctctggaatatcgaacagatctactgccaacttcgtggcggctgctgcgctcgtgagtgtggttgctgtggacgatcttggcacaccattcgagagccttctggtaaggttcgatatatgcactgtacgggaagttgtggatgttgtacccgccatcgtggttactcttcttcaagtgtggtcaggaagaagtccggcatgtaagcttaacggtcgacaagccccaagggacttcgatttgtgaagggggattgctctcgcataatgcttgcataatttctgcgatatcttccaacataaaccttgaaaggtgccctggcctttgattcgtcaatcttaactttatctcctatttaactttgctcgtccttttctgatacgagattatttaattactctttatctggtctcttgcccggtctcttggcccagcttttttttcttttcttgtcggttattcgcggccaatagtatcgtggactggtcaccggaccgctggtgttgttacttagggcgccattttttgcccgtgttctattagggagttcgagagatcatttttccattctgccgttcacggatcccagcttttgctgtcctctaataatctcaaccatcgaggtctttccggttgattatgcaagtatgggcactaaccgtggaaaagaaaactcggggtataagctgcaataatgaatatgttgtacgcatttcgtatgattttgcagtcttatctccggctggaagtctagtggcttaccccaggattgtacctttgttcaggcctaacggccattaggcggccacggacccctctactgaccagtcattgtccagagatatagcgatttaatacggcgcggctgggggtctctgtacgacgggatggaaatgcgctgtggaaaagactcttaaatacggcatagattcctgtcgagcattttttatccagcattttccgctttcattgctgcacaagatggcaacaatagaaggtgatcaacatccgatcagcgagaagggcaaatcacttcgaactttagtcgaagccgacctgctcgatgatcgttatgtaactacaaccaaacgtgggttgaagaatcgccatgttcagttaatggccctcggcggcacgatcggaacaggtaagtctgcagtgcgacatgaaaaaaaaaggattactcacataagtcaggacttttcgtgggttccggccaagccctggccattggaggccccgcatcgcttctgttgggttatctcttcatctcagccatggtttatggcttggtcacggctattgctgaggtaggtgcctatcttccggtacatggtggaacaatgagttatcatggattccgctatgtgtcgcggagtatgggtttcgctatgggatatctatactggtactctctcggaatcttggtgccgtacgagatcacagctgccggactggttattggatactgggaccagaatggatcaatcaatatcgcggtgtggatcacagtcatgatggtcgttattgtcgcgctcaactttatgcctgtgcgagtatacggcgagtcggagttctggttcgccggggtgaaaatcatcactctgatcggtttgttgatggtatctttcatcctcttctggggtggtggacccagtcgtcagcgactaggctttcattattggaataacccgcgtccattcaacgcctatctcgcaacgggagattcgggccggttcgtggcgttgttgaaatgcacagtatccagcgccattgcgttcattttcgccccagagctgattgtgatcagtgggggtgagatggagtcccctcgacgcaatataccccgggcagccaggagatacatttaccgattgatcttcttttacatctttggtgtactagccattggtgttatatgcccatccgatgctagtcgtttgaccaagagcgacggcacggtaagctcatcaccattcgtgatcggcatccagaacgccggcatccccgttttagaccacatcgtgaacgctgccgtcttgacatccgcctggtccgcaggaaattccttcctgtatatgtcttcgcggtcactctattccttggctatgtcaggcaacgcgccacatgtgttcaagacatgtaaccgatggggtgtcccgtactgggctgtttcggtttcggcatgcttctcagcattggcttatcttgccgttggcaactccagttcgattgtgttcaactggttcgtcaacttcaccaacacttctggtttcatctcatggatctgctgttccgtggtatttctccgtttccgcaaagctgtcaaagcacagggcattgaacagccgtacaaatcaaagatgcagccgtatggggtttattttggcctcgcgggtgccactctgatggcgctcataaatgggttcacagtgttcttcccatcggaatggtctgtgagcaactttttcaccgcatacattggtattcctgctttcctgattctttactttggacaccgggcactgtattggagtgatccatgggcatggcacccagaagaagtcgacatgcacacgggcttggatgaaattattgctgctgagcagccaccaaaaccacgggggccttggtggaagttttggtaacacataataggagctctaggggagagtatgtttgccaggtttgccaggtttgccatgtttgtactgtttgtcaatgtcatgacgtatcaactatccaagcgggtgtactgtggccactcatccgccttatcaccagacgaatatcccataacatccaatagcaattcataactcaacatctttttgctccgtaactcggagttggcccttatcaatatatttctgtacggaaaatagccagtgataccttctttattactcccatcgtcccacctattctctctcgtgttcggtatacgccgtcgaccgtctctctcccacaagttgcctttagtatcagcccaggactataaagactgccgtgtagaacatcatatgaaaattcgatttcgagtcgcgaacctgaaatcttaaagaatcagaactatggctgtgttaccacttaccgtccgtccgcttcagcctcctccgggctcaagcattgattttggtgctgaggttgaaggtgttgatttggaaaacttgactggtttgtggattactgccaattataagagcacaagctaatggtcatatagaagagcagtttgccactattcggaaagccctctacgagcaccaggttgtggtgttcaaaaaccagaaagggctatcacctaaagcccagtatgagctgaccaagcgattcgacccggtttccgaaaactatggacatggcaagaccattgatgcgaagcgaagcatcctccatcctgacctcaagactgtccctcaccagccacaggtgcaggtgatcggaaatggacatgttgattcgtacgagggtctcaaagatatcacattacgacaccctcaccaccgcacattccacaaagatcacatcccggacgataaggactatgattttacccggttttaccgctggcatatcgatgccgccctttacgacctatacccgccccaggtgacaacgcttatggccgtaagtgtgcccaaaggccgccgacagacattattgtatgatgatggaaccggggaaacaatggatgtaccacttgggacaacagcgtttgttagcggagagcggatgtttgaacttctttcgcccgaggataaggagtttgtgaagacaagcaaaattgaatatgccccccatccgtaagatcccttatggtattcccatggctctgatcaactgagctaaatatcacaacaggtacatttggatgagccaagcgcattcccgatctacggggctcggtctacactcagaaggactcgagttgcctgactcggaacttccacctatcgaccctagtaagatcatggttttcccaatgacctggaaaaacccagtgacgggcaaattggctctccagatccatccctctgctgtacggcgtatccactgcgccgatggaaccacgatcgatgacttggcccgtgtacgggacattgtctataagttgcagcggccggccatcagccctcagtatgtatatccccatgactgggaagataacgacttggttttattcaacaaccgtggcgtgctgcattccgtggttggtgcattcaaacccgacgaagtgcgactgttccgtcaatgtaacttggcggcttcggagccaccagttggggcatgagtgctttcatttcgatttcgatttgacatttctgctgttgtttgttaatattggattttcgagggaatcaatcgaacttaatctggcttgaattttttgaactgatataacttaaccgcgggaatcacatcttgagtaatgaaatattatatatcggatgttgtacataaaagacgccatttatgtatctgtaaaaagatctatgagcgtattgacaaggattagcggacaatgtaaaatccatgtacggcaatttggctctctctgagctcatcggtgacagagcgaaccccaacccggtgcaatggaacttgctctaccaacttctgtcctcggttgacgatactagtacaccccccgaccgtgcgatcaatccaattcgaattttgttgaaggtccggatgttccgctgcccacgcgggatgagccagagtatcatgtacaacagatgcgtcgtacacatcagcgagcagggccgcctcggcagctgccacttgcgcctcggcgagttctttgctcgtagttccagtgggtggtgggatttcagcgcgaaggtatcccaaaacacgaatctcgattttgcttgtttggagaggaacgtcctgaaggaggcgaatggcgaccacacgtttcgatatttgagccatatttactctcgtcgcctggaggggatccaatgcccgcacggacaagatagctgggtaccatccagtagtcgagcaacctttgctcgactcaaggtcgaatcgaacccagccgaagaagtaaccccttaactgctccgtcacccagtcgggcattctgattaagcttaacttcggcatattgtcatggttattggggtacgaggtttgatcgggttgacagcgagctttgaatgtcaaaggaaacggtgactgggggccggcatcgatagaaaccgggctgcttccagctatttctggcgctgctagatttacttgagatcgtccaataggacccttggagccattgatgataccacccacgcggttctcaacaccactcatcgtgtaagccttttgggccgctgtcattgtcacccacgatggacgaagcgcagcagcttgggcttgaagcggagcagtttgggcttgaatggctgagacggccggacctgccacggttcgcgctgcagtttgggcgtaaaggctcacaaccatagccccaacctccaagggtagcgtgctcaagctcgcgccacggatagagctaggggcagtggatgcagagagcacccggaacacggggctattgccaagcaccttcttcttgactccttggcagagaactagctggaaatatccatcgcctgcttcggctggaatccgtacaacggccgtctcgcgtagcttatgtgtatcgcgcggacgtggcggggccttctttcgaaatttcttgatgtcgcgttgccaagctcgttcatcatccggagtcacctggtcggccctcagcggcatacccggagtcacatccagccagctatctcggagattgaggaatgacttgaattgcattccggtcttcccggtccaacctttactctgcaaccacaaggtgtgttcgggaggtaaaggggcatcagagaaaattgatatagcgaccgatgtagtgggcccacggtagaagaccagtccatgggaatgtcgcaaaatggtgacatgcttgtttgattccgttggacgattgatcagaccagtgaggaaatacctagcttcgctgtatgccttctgaacaggcgtcggaggagccggagatgaggttggccccgctgtccttggtcgtggcagtgagcctggagttacaggcctggaaggtggcgtcccataaaggtccgtatatgatgggggctgtgatgatgggggtacaagggacggggtactagcagcataagctgtcgcctcccgctgatcggcatgggctgtagctcgcaagttcgggtttgacaggggcttccgcttgatgcgaaatgaatctggcggatggctcgggcttaaatgactagaagacattttctacatgatgttcaaggaattcaagaaattcaagaaatgccgggccctccgatttattggaatcatcactcttggccacttgcccccattggcccgagctggatattggcctgaggcatacattaatgcctgaggttgtaggccgttctcgagaatatgcgaaatatactgtaatcttattgcttttgacctcagctcgtactataaaactaggatgtattgaaggctaatggtatgcacctgcacatgccattgacctcctgcgttgggattgatctaggtgtgtagatacctcgaactagatccggactcgcggtatggcatgcatggatttagattgcttcaattatatgttttcagacatttgacctcttcaatttcaacactgtactatctttcagtatctcctactcccattcgtctctgtcattgatccgttcatctatcctccagcaactttgtagagtgctcaatctcattgtatgagaaacaaatattcatgactttcaccatttccacagctatcattgtcagtttggatccattccaaggctcttaaaactaacacacctgataatctatcaccggctgtatcatcctcatcccgtccatttatccgagtgtagtggaggacaaagttgacccgtggccgacggcccgcttggtacatttcaagtcgcgtggggacatcgtccggcgtactgccacaagggagcaaggtggcaatgctaactgcatcttcgattgccatagctgctccctggcccaagtctatcgagttgtcagtgtatgtcacacaaaacaagtttgtccatttgcagctattcggttgcttacatggctggaacggatgtgctgcatctcccagaagagcagcgtggcctcgagtccaagtcggcagttcctccatatcataaagatcccatactttgagatttttgtctgcacttgcaataatttgctgaacaccgggtgaaaacttcgaaaaggccctcacaattgtagtctggtctccaactgactgccaggctattaatcccaatttgtcagtaaccttctgtatcaacccccggaaacctcttactgtcactttggttgtctgcctgaacttcattcaaagggacaaaagcacaaagattgaggatcttgctatcagagcaagggtaagccacgagccgccggtcatgggatgcccactcaataaacacgccggtgtctcgcacaaaatcaacagtgctcgcatgttgctttaattgatctgtgggaagaagccaacggaagcatgacttgccaacggggtatggggagggagatcctggtgcgatactctggcgaatttgggactatagaacagttagaacagggacgagagctggataaacaccggtgttgataatctagtgttcatacatgtagtccatctgcaccaaggagcaggtcagccttgaaagtgcgaccatcaccgagagtgaccgacggacaagccccttccagattgacctcggttattctacaccctgtatgcaacgttgcggtttcaagggcacgttgtttgaggtggttgtgtagctcaactcgatgcacgaggtaccactcctgtgttcagattagatattgtcctggctgggtccgcttcattcgcctaccgcttgccaatgatgacgagtgtcagcaaactctctcttgtatgtcaactccccgtcaaatctatatcggtgtatctggagaaagcaaaaaatatcaattccagccactcttcttgtcaagagacaaatctgacctgatgaagcaatgtgcctccgaaatctgctggatcaatgcccatccagcgtagcaaagcagtgcaattcggcggcaaatggatcgcagccccagtttctttcaaaaaagcagacttttccagaatctaggcttggtgagaaattaattttgcagcaagcttgggttgttgcccggggcataccacaacacgatgcccctgttttccgagggcaatagctgttgagagaccagcaatgccggcgccgacgacgaggacgtcaagaggctgggctgataccgtcatgatgaggagcctatgtggtttttgagctatatcgactgatttcccttcatgaatctctgacgtgagatttatagcggtatgctctctcatccggtttccgagtttggcaatccccgatacttatctccgagtcagccaagagaagtggatgcttcaatgctgctagatggtccttgcaacctcggatagcacagcggtatttttgagctgaaacggaaggaagctatcgggcgcacagaaattgttgaatactgttgggtcgaagtgatcgacactgcattgttggacacattttccacgttcacctccccttcactccccttcaccatatccactccagtttgaattaatatggcgttgacacatgaaaacggtcctttgaattggagtcttataataccgtgtaatatccatatttccgataataactgttgtgccgctgtcatttcaggtagtgtgcgtggtagccaagacctttcacttcgttagccaatgagaatacaactgttgtgcatttcgcgtcagatctatccgggcaattggcgcgtcattaaatcaattgccctatggggagattgctagtcgtgaacaatataatattgcttaggctaattgtttatgggacgaggcagacagggcaggagggaagaagaaggtgaaacgtgttgatatgccaggagttcgtcatgtctacgagagcaagccctgtaggtatgtacgtgagaaaaatatatatatatatatatgattttagattgaatttcatatcctcattcagagctttcttggctgcccgttgcccacttggttggtgatgttgtagtcaccatagcaagcttcctggtacatggcctccttgttgaggtcgggaatagctctaaggaaatttttgaccttgcaaaatccattcacagagccatcacagaccttgagaccatcaagcggcagaggtgcattattcagcacaaatcggatatactcggtggtatcagacttggacgacaggtcagggttcttgtatttttgcacctgaagatccttgaatgcgaaatcattggggcaggtccaaacttcagagaacaagcgagcgccaaagggtgtcatctggtttaggttgaaggtgcggtgcggggcgtgcgcaaccgagacaggcaagccatgaggaccgtacttgaaataatccagacccaaagcagtcaggacagacacgatgatatcatcgtgggacatgtccatgtatagtggctgatcgagcgggaaagtcttgatgttgtcatcgtacgtgtagttgatgctgctgtcactgctcgtgatgagcctagactgcagacgcgctgccagctcctgaacatagccaatgccctgggcgcggccactgggggacccaaaaccgtagtcgccgtagaattgaagatcgatgtagtattcaaagtcgcgccactcctgctcagtgaagagcgcgcagaaagaggactggcccagtgccgcatactcgtacgggcacatattaagcatcgctagaatgtcgaaagtgtcgagcttcagatcctggggaaggtgtgcagcaagacgctctcgggcatgtttgacaagagacgaagcgaatacctgcgcagcgttgtcacccggctccatgccattcgggcaggaatcggtcgacgatagggtattgttgaagtcttcgagctcggggataatagtcagattgtactccgagtatgagctgttggctcctgtgtttccaaaaaagccacccagccaccagcgagcactctccaaaattcgggggtacgaggtcgtgcggaaagtcggctttgggcgcgcggtaccattgggatacacattcagtgatgcattccaggctgcattggcattttctgcgcgatagagcaatcggccatactgactccagaattgagcgccggaagtggcttcggtggcggcgccagtgggtagcagagtgttcaaaccaagcatatactcccaatcgttcaaaaaagacagaggtccggaaccgattttcttgtgtggatttttcttagtgtagttggccagtttctgggcaaagttctccatgccttctccatcgaggggccattgtgtaggataccgctgggcatggcggtgtagcacatgcacctgcgacagttcacactccgatggaaaccccttagagacattgaaactggatgcatcggcataggggctgaggttggcccagcttgttttcatatcaaaccctgacgggtatgagagaccggtgggactggctacggccgtggagctcgatgccactgcagcagtgcttaccgcaagagctagcagggccatggcagatgattgtagagccgccattttgatgctattgtcgtctctgggcacgcgacaaacttccaaaaacaattcgaggaatggccgacttacccatttttatctgcccctgtggagaggggaaaaggggatcgaccaaatctctttccttgcgtggaatcgcgtaagtccgttctgtccggcacgatgtgaccctagaatcctcataatgttgtattttgctcagggacaagataaacatccttgagttgcggtgatccccgaaatttcaatagccaagctcgcgtggggaaatgcttggcccgacgaagtccgtcaaaagccgtcaagggcaaaaaacaaaggagaaatacgagactttcaagggctgggggatgagccaacgggttgtggccattaaatgggcttttcttgcattcgtataaacccggtgatgcatcagaggcaatcaaagagaaggcaaaagaaggggggaacacatcacatctgggcacatgacctctcccagccctttaccaacacctccgctttgctgctataagaattcagctctcgggtcatgggctatacgatatcccgaaacccccattcgcttaccttgtaccaattgggatcaatgcagatgccatgtcgatgcagctgctcgtatcggacacgagaccacacttcttagagcctgcgcctcaactggatcggaagctccaaataaattgtttctgattacgagctctatcatgaacatgtgggagaaaccataaagcgcaagggatccggccctttcgagcagtttttttctttattttgatactcctaatgcagagacctccaaattagctatatcctagctattattgacttcactatgttggccctcggtattgtcttgtatgccctattgagtacgtccttggcctttgctatcgtcaagctagccctattggctttcattgctgccgtatattctggctagcatgctttgctgacctcgccagcctccttggtggtgctactattacaagctcctactacaataccgtcattgcctttggcgtgctactttggtaggttcctcggatagtctccagacaatacacacgcagtacaaagaaccgacctgacgcttacctcatatataggctgctatttattgccctagttatatttaccagtcttgccatgtgtggtgttttggtgtctgattgggctgggtaccagtctcccaggaaggagaagggagttggtatgaaccaaactagggctggccctgctcacgaagtgccgacgagtatgagtcctgtggttccatagaagttgtgttgtcgtgatgctaaaggtctttatgaacagccgaacagtcaatggcttagcccttcatcgccctcgcccacagcgtggaactgagtaccacacaggtccgcatgaaaccagtccagcataatcaccacagttttggtttggtaggattcgcaaggaatagtaatgggtctcatcggtaataggttatatcttttgcgtgtttccgacattctcatatcacctacactactaataatacgttatgccatgttaatatttgcttcaatgtgattatcaagagcatttatgttcatacaatccgcataaaaccgctgccgtgctgtcacgactaatcaaaggaggtatatagtccaatctatccgtctgaacaaactgtgcgtcgcaagccgtaagtgtccagtcgctgtaaaaagcataatcgtcaagcccgagaaaaggtgagaaggtaaaaagcaaacccaacatgtatgtccaggatataatgagccggctatcaagaaagacaagaccaggtacgagatggtactcaaccaaaaaaaagaaaagaagaatgataatggtaatgacgaaatcaaagagtggtctcttccacaggctcttttccaccgtgggtctcctcatggtcgtgcttgaacttcttctttttcttgtccttgtccttctcatccttgccctttttgctcatagcttcggccataagctgctcgaaggccatgtaatcgccttcttcctcggggtcgcgtgcggcctaaagctagctgttagcatgatactcaatatgcggaaaacaggtgtatatacctttgcgtatatattgccggcaattaccagcgcatgcgcacgctcaatccgtttctcaagtcgggtccgcttatcgcttagaatctgatcacaaacatcacgcaggacactctggatctcaaatttgctgccacgccacgccgctgcgaggatcttgccagtcactctcttctcgtattcagccttcttctcgtcagtccagtcttcaccaccgcgttcctccatcttagccatctcctccatggtcatctgcgcatcaatggctgtggagatggtggtccatgtctccttcgcaagagtgcccttgtccttcaagcgagagaagaagccagagatacctaggaacttctgtgacttgaggaaggaagtacccttctgaatgtatgtttgaccaacagcgtggagaatttccaaaccgaaagattccatttttaagttctccacctcaagtcggatcttctcctcgaaagcatgggacacgtccttacccttgtccgtctcagtccaaacgcttaaacgatcaatcagcttatttgcgagtgtgttgacacgatcttcgcgagcctttctgcgctcatcctcgaaagcgttaaggcgttcctgctgctccttagacaaacccttcttcttctccttcttgcgcagctccttctcctcctgagacagaccggctgcctccatgcgagcttcttcttcggatttgtccatgagggcttgctgtccgaaatttcgtcgaggagtgctggtaccagagccttggttggagactggcttttcagaggggccggcagctgcagctgcaggtgcggcctctgccgtagaaccgtgggtttcatgaacaggaacatgagcgggatcgccagctgcagccttcacctccgcgtcatgaatgttcagtttctcttcagcagattgagccagttcttcctcctccatttcctgcatcgtgatgtccatagtcgcggtgaggtccttcataagggagatctcgccgataagatcaacaaaggcctcgcccccgaagatcatactgaagaattcggacgggtcctctgtggaagacaaatcagaaacggtgtgctggacattggtatgcatgtgatggacttaccgaaaccaccaccaggtaccgactcctccttaccaaacttgtcatatcgctttcgaagatcttcgttgctcagaacttggtacgcctcaccgatctaaattaggaagatatcagttccgcgtaacatgcatcatccctaggcttgcgcaatcataccgcctggaagcgttcgtgtgcggtttcatctccagggttcttgtctgcgataatggattagaaagcctagcaaggaaatacaaggtcacatgcggccatacccgggtgagtgacaatagccagcttccggtaggcctttttgatttccagttcggtggccgtcggtggcacacctagggcgtcgtagtaagcagtatcggcaaccatcgcagcgaccgagcctaacttgagaacagattgaattgatggaaaatgaaagctcaatagattcaaagatctgaaggaaaaaaaaaacagtggaggggtgttgtttaggcagaacctcgagatatttttcggaagttggcgctgatatcatgtggggttgtatgcatggtttgctccggtcacgtgtcggctaaactctgcatttaatctgttctggccttttccccttttcctccccccaatccgccgttcccccaggttctgttgtttttgtttgtttgtttttattaatcctcgtcttcaatacctttgctttcggatcctattccaattgcttcacttggtgaagattcagctactttgcaacaactcttgaacatccgactcgcgcgcctctcccccgcccatcatgggtctcatcggcaatgctctctactactctttccaccccatgcagctgaggtcaattctccaatggtatgtttaggtgttcctgaagctcattcccacatgcgaagctaacgatccacgtcacataggaaagtctggcacaacccgccccatgagcgtaacgagaagaacgagaccgagaatcagaagatctgtttccagtttttggacaaaaccagccgcagcttcagcgccgtgatcaaggagttacatcccgaattgttaatccctatctgcatcttctacttggtcctccgtggactggataccatcgaggatgacacttccattccattggccaccaaggaacctcttctccgggactttaaggacatcttgacgcaagatggctggacttttactgggaatcggccggaggagaaggaccgtgagctgctggttcagttcaaccacgtcgtcaccgagttcatgaacatgaagcctgaataccaggttatcatcaaggacatcactgagaagatgggtaatggcatggctgactatgctgtgaaggcagagcatgacgatgctagtgtgaagactaaggaggagtatgatctatactgctactacgtcgctggattggttggcgagggcctcactcgcctcttcgtcgaggccgggtttggtaacccggctctgttgaagcgacctaagttacataagtcaatgggtcttttcctccagaagactaatatcatccgcgatatccgagaggatttcgatgataaccgacgtttctggcctcaggaaatttggtccaagcatgtcgacaactttgaagatctcttcaagccagagcaccttgatgcagctcttaactgcagctcggagatggtcctgaacgcgttggagcatgctgaggagtgcctgttctacttggccggtatgcgagagcagagtgttttcaacttctgtgcaatcccgcagtctatggccatcgccacaatggagttgtgtttccgcaaccccgatatcttccagcgcaacattaaaatcaccaagggagacgcatgtgaactcatgcataagtcaacccaaaacttgtcggttctgtgcgacaccttccgccaatatacgcgcaagattcacaagaagaataccccccgggatcccaacttcctgaagatcagcattgtctgcggacagattgagaagttcattgagaccatcttcccgacgcaatccgccgaggccgctaaccgtaaggtctctggtgagctcactgcggccgagctacagaagaagaaggaagacgacgagaacaagagtgatgtctacttcatgatggctctcatgggagtcattgttgtcgttatcgctagtctcatgatcttcgccgcctggatgatgggcgcccggttcgaccttgcctttaaggagatcacgtctggccacttcaggccgccggctaagaaccagcttgaacacccggagctttgattgtcttatattattttcacatccacggcgttacgaccttttactgtctaatattttcgattcccccttcggcatattgtcttactattttctcgcctgcccccggcgccctcgatgtgtattgataataacataactctttcttttctttgcctcgcgcacacacagactaaccctcccatttctaccccaccctttttagcacggatgtcaaattgcgatctggccttttcatggccgaggttgtgccgaagaagtacttatatcgaaatggagattcatctccctagccagtgagtactagatctttgtccaacggttcgcccgaggtggcaaacatccattgaagatctagaatatcccgtgtatgtaaagttgtatgtctataggaaatgaaaccatcagcctctggaggttgactcttgtcctgaactcagataactgaaaaccggcgggactagagaacaggcccccaatcagaagtttctgctatagtgtatatcttttatttctcggcaataaatttcttccaactgccggcccatttcttttcgctttctcgctcattactcttgccatctatccatcggccaggttggcctccccgaagcatcctcaatcaaatgggttccaaaaggatggcttcttcttctggggactccggcgactccccactgtccgcgagtgatttccggacttataatcgtatgtcggagcaaatggaaggatttgtaagcttaccatcacacctgggcacctgggcacattagtataccttgagcactaactctcatgcagcatagtcatttccgtttgacatggaaccagctttgggaggcctgtgaaaactctagaaaacgggggctttcagcccgccagatgattatgatgggccttcaattctgttcgcaattggatttccatcattccatcgaagagcaacacatcttccccgtattggcgaaaaagatgcctgagtttcgaaaggagcttgagctattgagtcagcatagacagatccatgcaggactcgagaaactcgagaagtatcttgagcagtgtcggtccggcgaggaagatatgcgtcgcgaagaggtgaaacggttgatggaagggtttggcaaggttctgtggacacacttggaccaagaggttcaaactcttggagctgctaatatgcgcaagttctggtctcttgctgaaatgcgccagcttcctatgtgataataacgaacggaggcaagttttgtcaatttcattttcagaaacatgtccaactttttttgaagagtatacatatctgtgtgcccatttgaattaattcgaactattctggtttgctatttggtcttgaaaaagcacctatgttttgtttccgagggatctgcttctgcttcatcaatgtccatcacaagccagagttgcagtttgataatggtaacccctacacgaaaatccttggcttagagtcgagtgaccactgctaacaatgtggactgttcccggaagctccaccacagcgtacttgggaatgtgaacacgttgtcatcccttgcctggtatgtatactaaccgcatccaggtagcattgcaagcacgcccccaacttctgctgtttcaaaaacccttgacactcgacccagtttgtgtatgtttctttcttctgttggcgatgatgtcgtgcgaaacaagcactctcagttttaccgattcatcggtagatgtagcgagaatgccagggtcatatggaacccataaatacggagcagccgcaaagcttcggaatatcgacactacatataataaaatatacattgttaaccttcaatgacatgtgcgtcacttcaagttgatcaatctcgtggcagatatcggggccgccgatcttcatctgatccgtcagcgctcggctgtcagatgtttctgtctccaagaatgtgctctcacagaagtgcacaagctcggccgagctgctcattttcactaggtctcacatcatgacgataacggaaaggaaatcttggcttggatcatgaacaatcggcgggaaacagagaagatcaacacatccgcagcaaatgcaggtcatgaacctattaatcgacgtggctgagatccccagaaataacctgacctttttcactctccatatctccactccagtgggtccataattgtatctcatcttgtgtctggggtcatcagtactacaccacgcgctcctttcctcatgcggattgggcatgatgtcgtgccgcatgcaacttatatgaaatacaggatataagtaccatcggaccaagctcgagaaatattaggttagtcaggttatagcttcgcccttgctatctataccgtgtcaaaatccgctcaactcactgccgtttccaccaacatgaagttcacaaccaccacgatcctaaccaccgctatactagcaggcagctctctcgcagcccctcgcagcggcctggttgaccgcttgcagacccgtggtgctctgtcacgccagtcactacctgccgaaaagaagggtgtattactgagggaaggaaccgagggagtcaatgttcaatacagcaagaactgggctggggtggtgcgcgagaagccacccgccagtgctacctacaccgctgtgtctgcaactttcaccgtccccgagccaacggccaccgatggctctggggatatgcaggctgtgtccgcctgggtcggtattgatggggacacttacaccaaggccattctacagactggcattgatgcctacatccagaatggcaagaagacatttgacgcctggtacgagtggtatccattaagtgcggagaactttgaccttgcattatccgcaggcgacgttatcgttgcgaaggtcgagacagattcgcccagcaagggtgtcgctatcatcgagaataagtcaagcggccagagtgttaccaagactctgtctgcaccttcaacctccgccactctcgctggccagaatgccgaatggatagtcgaggacttcaacactggtagcagcatggttccattggtcaacttcggcagaatcgattttaccggcgcccaagctgaggctggcggtacgaagtatggtgtcaaaaatactgctgttttggatatccagcagaatggcaacgtgaaggcccacgtggaagtccgaagtgacactgagttctctgttacctaccggtgatttgatatatatatcggagttgatgagtctggcgttttgtacaatggatgatatccgtcatatatctctcaatcgagataaggaggaatttgcatcagcaaagtgaggtatacttctttcattcaatttagtgaaatctatcaaaagaaaacaatgattgatcacgtcatttatttcttcctgtgataattggtcaaaatatccctgcccggatcctgatgaccctttattatcttttctttataaaccgcgtattcagacatgttgggcctataattagatgaagagtgcgcagaagatgttacgaagaggaaagataatagacttcttactaactattcaggaaccttagaaatacacatagcatcacaaagaaaaggacatattttggatgttgaacaagaaattcgctgggatgacagaaacgacgacggggtattctgctgaatgataagaggaaaggacaacaatcagatcgaaacgctcagaaaagataaaggcaaactgtgagcctagtaagggctcgaggtgtcggcaagaaggctgtacgagtttaattgaatacccagagggcgaggttgaggcatcaaggcgcctagcatctgctggtcatcgtactcattgcctgttccatctgtaagcgcgaagaacatggcagatggtcggttcacgcgcaaagcttccaggatgtcgtcactccacaggcctgtgcactcgttattgacaagttcgaaatacggattcagaggcggacagcttgagtcgaggttgatgaaacggatgcgcaaatactccagggcagggaggacggataggcactcgattgccttgaccaccattgcctcaaaatcacgaatgaacgcaatgctggtaattggacgtgtcccgtagctcgtctgcgtccagtgattcaatccgtctaccttctgattgtgacagcacgtcttgactgaaagatctagtgacctgagaggagaaccagactccatttccgttgccccttccttcaatttcttgaagaggtaccaacatacacgaccagagtaggtaaatgactcgaagcgcggaattgcctcgccaagtagagtacagatcggaggaggcgcgctttgagagcggaaaagcgcagacagcaacctattactggcgttggaaaattcctccaggccaagattgatgtgtcggatggtaggtggagtatcgataaagatgctcatcatgatcaagtaggcacacagatggggttggacccaatcacaatgccattcactcaaagctggcaacgcttgtgaaatgttgccccagtcgtcaacttgtcgcatcaggttccaggcaccacgcatgatgagtgtctgtatttgtccaagaacaggtagattccgaccgttcatggcttccctatagcgggaatgccgcactataggcgcattcttgcagtggccaccctccagggtgagaacccgggcagtggggaaaaggtactgaataagccagaagatttcctccagcgaagtgttaccggttgcacggtgataacgaaaaataacatctccgtggttatgatcatgattcgtctgcatatctacaacatgttctgttgcatgggtgccattttgctctgcatttgagcgagcatcgttagggcgaacggcccgatttccccagataggcatccaaatctcaatgtgacagacatatggagccaaatgggggtttcgcttgaaccaccatacacacttgatcaattcgcggttggtgcctttgattttgactagataaaggctactcattagtacaattgcgttgaacttcagattgacagtcagataaaactcactatggcggtagattcgactttgaacaagtccagtccacatccggcaagtcagggccaggtcggaaagggccttccgccgcggatggtggagagccttactccagttctgagcagaagattgaccatgtgctgaatggttactaagggaggctcttttgccaaagatttgatccagaatgacctcatggatctcaactgggagctctgtgaattggattgccgactgtcctgccaggggatgagattggtcctcactggcggcgatatgggaggtaagggtttggtagtcatcctgaccaataatatttgcactgatgctgcagtttggtttctctgcgctttcaggaactgcaacaggtgcactggctaggggactgaccgaccccggccggagagaaattgcggagatcatgagggggggtagagatgaggatgaaagaggattggaagagtcagaggccattgatgcgacctggtcttctttagatcagaggctgcagcctgatagctgcaatttgatatgtgttagtgaacaaacgagccatgccggggatatgcatatagatcgtactcacctcacagctgtggttaaccgctatcaaagccgctccggctcaattcagtttaggtacagacgggttatctcagaggatcctgttcacaaatgaatgaaataaacgtcagaaagagagagggtcgctggccgatcaggctgttgggcagcttgatgaggaggattggaaggggattggcggggaagagataggcccggctgaaagtgaagagacgtgaagatgaaagaagaccgagaacacagtgaaggagaaaagaaaagcaaaatacatagtcagaggaaaaaagtgacgggggagtcagaataaacgcgggagacgttgcgcgacacgaagttctacggttggaatacttgatatcggggcttttgagaaccaagacaagggttgtgatcaataaaataacacgaacataatcaaaatagatcgaagcctgcattatacatgtatttattgggtaacaactatatcatgtcgtagatggtgtacatgggccgtgatagttcccttggccctatagatgccgtcgttttcgcaataagaaacatgacaggaataacagtcattgcgattgaaatcggacattatttccttgcagacatacataacacagatcagcaaatggatgcgagggtatcgatgcagagtagacgctacaaaaccattgcaaagtgagaaagaaaaaaagatggaagctagcgcttacgcctgaaacggaaacgaagttcatcatcgctgtccgaatcgcgctcctcgcgagccctcttcgggggccgagccggagttgggtccgaggtcggttgaagcgaggtgcgtgtaatcgctgacagcttggaccgtgatggagcaacttcatcgtgatgatcagattcaggacctccagcctcgttctgagggtaagtctcagcaggattgccaccccaatagtgatcgccaattccatagtctttgcgggtcacttcttctaaggggacgatcactgtctggatgcgagctcgactacgcggctcgccttttcgccggaacttcttgaaattcttgcgcccattccattgatcatcccatctgtccgaactgtcatgctcgtgcgctggtgcgttccggacgggaatctccatttcttccacaatagccaggttcttcaatttgtccacatccacatcacctacatcggctgaatgtgagtcttcttcggccttgcgttgttgttcttcttcttcacggtgctttcgcgcggcttcgagcacgtcaagtttaggtcgcttgcgtttcggggcctccgattcgggggctacggcctcatcctctgggtgatggcgagtcatatctgcacgacgacgcttcattgcacgggcgcccgggagaagatcagccaccatgtcctcctcagcctcttcctttactatattcaggggctggatttcttgagatggcgcttgagtttcgatatcgatggtttgagtggagttgatattggtgtcctcttcttcaggtgcatacactgggacagattccatgtcgaatccgtcatcgaaggttttcattttactgacgtatgcacgcacacgggtcttggccggagctttcgagggttgactaggctcagagttaggcagatctaccgattcaggtacggcagaaactgcttgttggcttgtttgttcagcctcgaccgcgggtgtagatgcggtgatctgactagagctctcctccgtgggcaaggtacggcagaggggtgatgcatcatttccaaggatagcgtcaaggaactctcgttgctctatcacgcgctggtccatcattagagcaacctcattaccgacgtcaatagaccattgttcgaggtctcctttcgatcgaaagcgaacaagaacgacgccaccggaaccgtgtcgctcggggcccacgcctttctgtcctgctgccttttttataaaccgaacaatatctgcggcagttgtgaccccatcttcaatttcgtagaggagcgccttcccttggccattgttgattggaccttgtaggttttcaaactggcttggatcaccgaaaataaacgtatatccctcaaagacattaatacgtgcgggattgggagcgaaagcagcggcgggacgctgggttggttctttcccggggggcggaaggtgttgatttggatcgggccatgctaattcgaagtcggtttcaagtggacatagcgactcaatgttctcaagatccccgggggtagccgcgtagacgagtgcatcgatatatgaatcatctactatgtacttcccgttgacgagtgcctgaagacccttagctgtattccgtttgcgctgtaccacatgtgttgtgtgatcgacaatataatccatgatggtcttaatgtcgaggtcttctagacgtgagcgaacatgggctagaggatcttcacctcgcacctgcttggaggaggatgacaaggtcagaaccacgggctcccatttgatcctatcaagagcatcagccgggattcaagccaatcgtaagaagacatacgcaccggagcgcatgctggtatttagcgagctggatgagatgctcatcgctcttctccaacttgcattctccttggattctcctctcgtcaacgactgttcctttcttcgagtctaaatcggttatggtgatattggatcgcgctcgtagtgacaactggaggggtattagccagataatgcatatcgtcgcggggagttcaaccgtaccccatctcgcggactgaccggtgagatttcaatggtcatatgcttgcgggatatcgaattatgattgacagcatggcggactattcaataagagatcagccgaactgtgtgatgctccaactgaagtaggccatacctccgtctcgatggaatcgaccgaatagatacctctttccagggcgcagccacacgcgcttccctatgaggctttagcaaccaatcgatccttgtcaatcaaatattcccaccttccagaaaatcaccggtcgaatcaagaatccacatgacgacgaatccgcccagagagatgtttagcgttaggcaacatggctgaggctcacgcaaattggaacgcgtgtccacgtgactccgcgtcaaattgaattccgcgctctcgccttctcatgatcatctaccagccatcgatgggacggtggaaagtatggagtcttcaggtgagaaccccgccagtgatccgaagcctgagtcggtccctgatgaggattttgggaccctgaaatatcagctactcggtccctctttaactaaagcgggccaagattccgtcgatcagcaaaaggtgcgcttgatgattgtattcattttgagctttagctaaactcgcgtttccaggtatcagaaattatatacaatgcctccaggggctctaagttctttaagcacgaacaggatcgggatcggaatctaacgttgaaaatcgagcgaattctaaaagaaaaggcacggctagaacgtctagacttgagcagtgagctacgacgtgccgatgaatacctcgcggagcttgaatcgagccgtgagctctctcaacatgtcattcacgtggattgtgacgcgttctttgccgccgtcgaggagcttgaccggcccgaattcaagacagtgcctatggcagtcggtaaaggagtgctgacaacctgtaattatctggcgaggaagtttggcgtcagaagtggtatggcctcatttgtcgcgaaaaagctctgcccgcagctggttcttttgccgccgaactacgacaaatataccgcaaaggccaaggaagtccgagctatcatggccgagtatgaccctctcttcgagagtgcgagtatagacgaagcctatttgaatatcacagcatactgcgacgaaaatcacttggagcctgatgaggttgttcaacggatgcgcgcagagatattggaaacaaccaaggtgtctgtttccgccggaattgctgctaatgcgaagattgcaaagattgcatccaacctcaacaagcccaatggacaatttcaagtccccaatgaacgggaggcaattatgaaattcatgcgtgacctgtcggtccgcaaagtgaatggaattggccgagtatttgagcgagagctggaatcaataggcgtcaaaaagtgtggtgatatctacccacatcgtgctttattgaccaagctatttggggagaaggctttccaattcctggctcagtgctacctcggtcttgggcggaccaaaattgaacctgtcgagacccacgaacgtaaaagcgtcagtacagagaccactttccatgaaattggagacaaggaggaacttcgagcgaagctctggtgggctgcgcaggagcttgaaaaggatatggcccggactcatttcaaaggccgcacgcttgccctgaaagtcaaactgcatactttcgaagtgctgacgcgccagacagctccatctcgtgccgtcttcctggcaaaagatttgtactcctttgctttgcccatgctcgccaagcttgagaaggatattccgaacataaagctacggcttctcggccttcgctgctcgaatctggtcagcactcagaaagttggaatcaactttttcggcgtagcaacacaaccaaaacccgccaccgagccaacttctgagcccgcccctatatcgacatcggatgtcaatgtatatcatgagatttgtgccgaggaggctttcgaggcggcggctcgccaggaaatacaggacgagatgaatgatctagagcagctgagtcaagagacacccgatgttcatgagccagaggcctctgcagccccaccggtggttgaaacacccgcgatgtgggattgtcctgtatgtacacgaccgcagattgcggatgaccgcgcattcaacgagcatgtggacttctgtctctctagacagacaatccgcgaagtcgtgcaggacacatcagaagaaacatcctcaataccccccaattccagaaaaaggaagttgccatcacaggctggtattcccgaaatggatccaaaacagaagcggctttttttccaatgacggcgaaacttggatgccgctcatcccgacagaaaagcgccgatactcaggctcggaatccagcaatcatttaatattgcagggtcaccgtttttcaaggctccacttgacagccgccagattcgggatagatgtgggacgtctaggggcgagacggatacagggggttcttttttctatgggtgtgttggcaatgacctgccaatcaagggccttgtagaacccattctcacaaaacaatagaggtctcacaatttcctcatcgcaatgtcaatagttcgacgcccttgttcattgaagtaaggaattccacgttgcggtgaagcggcgccctaaacccaatcaggtgacattgttttcgtcactcgactttctcctcgactttctcgactttcccatccatcaggccacaaattccctgttacggaacaagaagacaggcgattctttttattggccggtgccacaatgctcatgtcctgtggcacctcgcaatgccatgacttgcaccccccgcaactatgacctacgataaacaaaacaatggcagtatcgccaaaccgttcacacccaccctcagcgctgcattccataggagtaacagggctcctttgacaccaaaacttgcaagtccaagtcccggtccaggattcccacgtcgcctcgcacaacccgaccacccctattccaaagacgactcccccgcggtcccgacctttctgagcgccaacgtcactccacgatccggtcctcgaaccacccggcgagatggcgctatctactcccccacaaatacttcacctgccccttctccctctccaaatccaccttactcccagtcaacaattggttatggtcgtcgagaccgcagcccggcccgcggggtcaagccggaacaatctcgaactctgaggtcgaagacattgaccgcagacaaccagcctagatcaagattgaattctttctcggatacgacatccgggacccccctgttcttccatgcgtccgacgcacgatcgtcacatccttctgagccatcagatgcccctcgcccgaggccccaggggaagacatccccagcctcgagcttcatatatgcgaacggagatcaagagcgaaaatcactaggggagcaatcgaatgttacatccgcttctgccaaacggcgatcgggtggtcttccccgtcccctgtccgccagcaaaccaccaccttcctcctcgcgcttgagctctcctggtcttccagatgtagcttcacaccctccagaagatatcagattaccatatgtcaccagcattgagagtggactaggaattagcccgcgtcttggctcgccctcgtcgagtacaatcggcgagagaccgcgaccgcatccgatccgacataccaagtcctcaagcgtcgactcaggccgccatggcaattatttacaagacagcttgcgggcaagcccagtcatcgtatccgggagccattttggtgaagaaccagcgcctgtgatgtcggagcagatacccgcccttcgccctcgcatcttcagcaatgtatccaccacctcaacagatacataccctcctgtaccacttagtcctgggaaatccgagggtccgagtgaggcagctcttaatgcgcgtatcgagcgcaagatcatggacttggaaataagcaactcttcactactagccatcaatcgtaccctggagcgcgaaattcgacaacagaaggcggagcttcggcggttccgacgactgagtcgctccggacgcatatcaatggcaccttccacccgttcattctccggagcggcactctcagttaccagtgagctaaacgagggcgcaagtgagatttcgaacctgtcacaagacgatatgtccgacatcagcgatgaggattcaattgtggatgagagcatcctgagtccgggctcgctggccgagcataatgccaagaaccgtgtcaatgatgagaaacgcgtcatgcttgacttggcgcgacatcaggaggtgctagtggacagccagaagatgaaccaaagtctcaagcgctgtctaggatggaccgaagaacttatcaaagaaggacagcgggccctggagtacaatgttcacgttcaagacgttgagctgggtggccgagtcctagcgcctgaagagttgggcgaaattggtgagagcggccgtggtcttttgagcccttcagtccaatataacgcctctttttctcctatggaggcctccgaactatcatttactgaatcactatatattggaacactatctcctacgccctctatttctgatccgagcacctgatcttatttttggcccttgtctcccggcgggacgattcaattgttttctttcttcctcatacatttgcacaataccctttcttttttgatgcgtttcattttgaattcgtcctttcttcgatcgagacagatattatctcactgttttggacttagcgacttgtactatgagactctggacttacctttcttcccttgcgttcacgatttccatcagacaggatggtcaatgatagacctctatacccgatcatttcatccatcgcgaacacattttttggctatttcgaaagatacccgatgtgcaattattgtcttgtgtttatgttctgtctccatgtgcactaattgatctgcacgcttgaaaatgctagacttctgaccatgttcgcttaatgctgtgttcttcaatatctcatgtcttgattttctagaaaagaacgaccagtcactatggttactctcacagtctgcaactttgaaaatatcattatatcatggtcaacatcatcaagagtctcatatcatggaaatggacactgtcccatccgctgccgacgaagagtctccttgaaaccctccaattccctgtaccccttgccctcaaaatacttcggtcccagatcatcggtgcgatagccctgtgggtaatatttgtccccgtcatcaccaggcaaaggatgtccaagtgcccatttaaaccatgccatcggcccccagcggttccagattgtgggctgcacatagaatggagctccgtcgtatatcaacacccagttgcggccgtgcttattcggtttgtcggtgaaagcgttcaagcgcaagaagtctgggcgtggcagtgataggtatcgcaggtatagttggcggagtttgaatatcaacgcaagtatgccgctgaaaaatgcaggtggttcttccatcctagaaaatgtacacattagactcgctgaatgtggtggtgagttgggatacatacatcatcgcggtccgcaatcgatctcccatcagatatgacacgaagtatctagccaacggcttcaagaaatttggcaagttatataccagcacgtcaatcgtcttttccgcaagctccttgttgcgggggtgtggcttcatgtgctggatttcgtattgctggctccatgcaccaatctcccccagccagtgaatcccatcttggaagccagtctttccagagggcaaagcatcataattgatttccaacgcatcaccgaggctcttccagaatgtcccgacagcacatcgttccatttcagtcatctcgcgccactcgaattgtttcacaaactggattggctcgagagcgaataagctcagtgtgtataacatgtcagcttccatgatcttgccgctagctctgtagcccttgtgcagaaatttggttcgggctattgctgtccgcgctcgctcggagcgtgggtcgaaagtcatgaattcgccgatcagtgtgcctgtgtcggcatatcttttgaatgatattgtagagtctgataactgtgatgtcttcaggagcagtgtggatattgtcggaatgccatatgtctgcccatgtcaacttccagtcatatacatacttggatgggctttgcatacgcggaagagggcaaactgcagtgacttaagcacaataaagggaaactcggtctgcatgattgtcttttgaataacccaggcatcctgatcggacatgctgcgcatggattgcctcgttccgtagcagctatatttactgtggagtgtctgccgtcgttggaaacggagtgaagatatcagcgctaggtatgttgctagccccagcaacatacatagtgtctgcttagacagtgaagcttgtagcaaggagctagatggagggacatcctcggtactggacgtaggtaatgatgccatttataacaaggcgacggaaatcactctgtagatatagatttaggtcttgagatagaaataatgtctattaagatcaattaattgcactcggtcttatatagattccatcctctatgaacatataaccttgatgacgattaatcgtgaagtatattgctgatctcatgttaagacgaccggaccgaggaagataggctgcggggaaatctcacatctcaaatgcataaatttttgtatatgggtgtacatcatgggatattgtgctaaatagaaatacctatgagctgtattcaactgtacaagagagccgtgtagtttcaatataccgaggtttgcaattaaacccgaatcattcgaccatccacgccctctgtgccagtccaatcaaatcttcatgaatcagcctgatcgacaacatactcggtatctcagtcggatggacttgagccagcatcgtacgatatatctatcccttgtctcccctcttttctcgctttgtactcgtgcttttttactgaggggctgccaatttctccgcctcgaaacacaaagcgtccttggttgcccacttccttggaaccctgcttgtctttaagagggtatgatcttcttctttagataatcggggaatgcgagaaatcacaggaccctgttcttgaactttcagcggtcttggcttcgttctctcatccatatcgtctgacatgcctaatagcttgcttatatgtattgtatgtagtttgatgtcgtcttgatcaggtccgtaactatgtacacatcgttatagatacatgcagtctccctctcattttagtgctgttgtaatctcgccagcaccgtctcctccatcccgaacgatgatacctaggatccagacgttcacggcaaagaagaagagccctgcgagaaacagcccaggtacgaaggatgatagtcccaggaattcgagattgtaaccttggtgcagccagagggcctatatagttggtcagagttgaagccctgaagattctggtatcagaaaatcactagacaatacatacctgtccggcaatccatagtatggctgctgatatgcccagagccggtttacggatgagcgaggaagatggtaggtaaaatggaagcaggatgaggtaccagaggaaatactaaacagattagctgcgagtatgacaattttcggatggagtcacatacctgactggtacaaactttgttgaaagtgacaaaagtaaaagtctgcgcaagcatcgtagtagtcaagctcttctttgccaggaccagaggcaaagcaacaaccacaaggattagctgcggaaggaaggccagtgcctcaaagcgagtttcggccccacccgcagcagaaagatagagcagtgtactatagggagagaaattgtggcggtgatcgatacgagtaagatggtggaagaaagtgtgatggaggaacggttgaccgtgctggaggtacatgacgagattcaatgccacgaaactggccagtgctgcaactgtaaacttcacccgggacggagtaatgaaccccaaagcctttgacagcagacccgagccagtcgttacagacccatcgcgctcagcatcccaccaccagagaatggagacaccatagatgaacgggtaaattttgaaatgcacagcaagacccaggataagcccagcaaggacaggcttcttcgtcaaagttgcccagaggagcgccgcaacaagcacaccgagcagtccctccgaactaccacgggtactgatattggcaaccatgggattccacagccaaacagccgaaacgtaccgcagcgcgcgctcgacgggaaattgatagcatcggacaagcagctggacaacgagccatccagcaaggacgtcagacaatgcaaaaagcgcctttccaaaggcgaaagtcagtgttgaccaaggcgtggcaccttcccacgcagtagggagaagcatccatgccaagagcggcgtgtagcggtaagtatcccgagtgtatggcgactcgccctttgcaacatagcgcgcagcatcagtgaacaccatgtaatcgatgtcggtgtatttcacggtggagtgcgcatcctgccagcctccatagacgaggaaaatgaggcggagagctgttgcggcgagaaagactcgcgctggagagtcgaagatagccattcccttacttgccaaaaacaaacactctttttcgtcctttgataacaaccaaataaagaaatcaaaggttgctaggttgtctgttgcggctagctcgcataattgggcggcttgatgaacccctggcggatgtcgtcggggaaaggaaggagctgcacatccaactaatctttttggatcttaaaatctgtagtgactgtgggcatgaattaattcgccttccattccataccattccgcttggtaaatcggatgtttacgtggaagataattgttgatgccacctcgaggctgatatccgctgactcagcatggtccgtgtccacgggtccgagattgcctaatcgggacgagaagtatacctccagggctaggtattgcacccttaacacgggagggctgctatggactggctgttcactgtttatgccttacttaggcttggggtttgagtatagtctatctcttgttggcgtctctcacagctgtacactgcctcgaattcctggggctatcatccttcgtgcctgggctgtttctcgcagagctcttcatagaatgaactgcccaaaccaaggtctttacccgacaagaacaagaaattcccactaatctacgttggaactgcaagatgtggggaaaacgtttatacccatgtctatgtcttcacgtttaaactatgtatcaggcaccggctaaatgcctcgaatttgacgcttctcaaacgtggctacagtgaatctcaatagaagcgtaggttggtaatcctttgaactcacttgtcgcagggatgatatctccggatgtatgagggtcaataatgctgcgatcgaaggttctgcttgaatacaagcagatcacaataaacctcatttagactatgtgagcgggccatgaaccacacagccgcctcaaagcacccaaaacgagaccattgacaaaaggcatgtgcagcgtaagcgagaagtaatcccttccaagtgagacccatcgttacagctcgggcctgtacaacatcactcaaaccccttctgcaagaagccatcgtccaattttagaattcgaccggccaaattgggacaattagatctgataggttagaggccgtcagatgatgtggtctacttctatgctaaaaaagaaataagacaggctagttataaatctcatttaaacctggctatagtcttaacatagatcgttcaattcattagccagagatgtactgcagatatatccatactatctgtgtatcttatataccaggatacgaagatggtgatcccctgcagaggaaacgaagctatattacaaacttcattatctccccagtccgccgtatcttttcatagacatttgacaacttcatcggagcttggtgattatagcgatacatctccttgtttattcttctctccgttgaagagacttcatcatggtcctgggcatgggaaagtatatcaatcgagggcttctcaacccaaagtccgatgagtctgcaaaggtcgagaatgctaggtcaccagtgagctcgacctccaaaaagataaaattccgccgccattgcaggcgattctggtgcttctacctcatcgccaatgtgatagtcttggcgattttcctaccggttttgtaagtcgcagtttttacatattctcctgtttgtgatcaaactaacattgccaaacaagctttctggtcgcgattcctgcagtcgcgcaactagttgtcaacaaatcagatctacgactcgtcaatgccaaagtgatgcacccaacggcagatacagtacgaatgacactagaggccaaggtgaatctgaagcttgcactaggcgttcggctcgatcccgttgtcttctacgcatttgtgcgctccgcaggccacgagaatgcatatgcaggaattgagatccccggacaaactatcaagggaaattattcacttaaagtcaccgaccagttgacgccaatcctcaatatgacttcctgggaaacttttgtgagtcaagctgtctcccaaaaggaaacagcattatcactccatggagtgactgttggatatctcggggtcctgaaaaaccacatcatattggataaagatgtggtaatgccaagtgagtcgctcgctagagtggtattccacggtttgctaatcttcgagatagctttaaacaagtttgaaggcttctccatcgcgaacagtacattcctcttaccggcagaggacgatggaaccaatctcgttgccaatattacacttccaaacccctccgtcctcagcttcgaagttggcaccatcacacttgacctcaaaagcggcaatacagacctagtcatcggcaacgcaacggtcaaagacgtcacacttagacctggaaacaacacattcccgttgagaggtgtgatcgacattggtgcgatgatcggcaacctcagcgaagttcttagctcacagggccccgccatcaggacaggcgcactgagcctgacagctgtgaccagatctattgtatctaacggcactctaatcccgtactatacaaaggtcctcgggtcacttcccctcgtggcaaacgtgagcattggcgacgttcttagaaactcgctcgctcatctgggctcgagtgaaacattgtcagacttcgatgacaaacgcaggagaggccctgtacagttgggtggcccggttggatacggtgtcgcgtataaccaggtcgcaagtctgaaacacaacagacacgttcaaaagatgttcgaggatgaagatcccgaacgacgagacgcaattatagaatcgctggctcgatattatgcttcactatgaatgtacacttttacttcaattggatttaacaatacctcagtgacagttttcttcctgaattaaatcttgatatctggttcgctaggggtggatcgaccattgaggcaatgagccaatagtggtcatcatcctagtgtccaaggatgaatgaagctgttgtggattaagatcccatttttgtgccaaccgtatcatgaaaaacgagaaaaatcagaaatcctacagtacattgagatccttgaagcattgaatggaaagttaagtctgtcatacgttcatttccacatatcccctatgctaacatgctgagaattcacacaaacaaggcaataatagagttgggaagagaagagaagagaacaagatttcagtagtaaagcccgccatttgtgaaaaaaacagggtccggcatggcatcaaaatacgtcgattgttctccgaatttcagacctttctcatgatccggggtcaacaaagacatcgtgtcgttcctctcatcaacatcagcggcaatccccggccacaaattgttgtcactccaactcagatactcccagagatactgggcccccgaatcatccgtgaacggggtattagcgagggggtcaaggaacccattctcgcccatgttaccacgacatgtattagacgccgcaaatatgagcgacatatcccgatcagcgggataagagccaccaaaaatgctagcggaagaatcaggatcagcgaggtcctgcccccgcttgctagcctcgtagatacgcgagatagcatccagcgatcgcttcgccgtatggccaaaggactgcatacgggccagagtcatcatagccatttccacctgtacttgacaggactcaatggaagcacgggggtcatttaccgttggatcgttgaggaacaatcccactaagggcaccagagaagcctggaaggtccaccaaacagcattccatccgcacaattggttaagctgcgctgtagcggcaatattccgaatagattcttctgcgacttggcgacatttttcaatcgcagtgcgctcctcggatcgcagtgctatataaggcacacgtcgcatggcgtagttgagcagtgttggtcggtacaggaggatccgctggttataatagcgccagcgcattactgtgcggacagtttttattgactccgagcagggctggtggtctttcaggacggaggggaggttgtcccaccactctaggagctgtgcatctgcgtgggccatttcttggtgcttgactagcggtgctgcggcgagggactcttggacttgggttgcgattttggcgaagcgaatgttttccactaaggggaggatctcgaggacgtttccctattagaatgacattagtcaaacgatcgtttttttttttctttctagagtgtaacagggcctaccttatctcgacatagagggggtttaactgtaatgttcgagcctatccgacccatactaggtcggcctagcgtcatgccggcccaggtatccatgcagaacaaagaccaccagacgcggcgcttaagatccatggaggctagcttggccggactcgatatttgatgagtctccgtaaactccttgtgcaatcctagggcagccgccatacgcagcgcggcacccataatggagtatgctagattcggctgactgatatagtgacagtaccagccccccatcagtcccagcgcctggatagtctcgatatgggagcttcccaaggaactcagagttaagtgacccttgaatcgcaggaagtatgtctggtgtgttacatcatcgggtcctgtagcagcaatgcaaccgagagcaagaacaatgttcagcagagcaagccaatggtcatctctccgacgaccagagcagtaagcctcacggaaggagggctcatcgatcatgggagcgaaggcttggaaatagaggaaatatgcatcgagcatttgcatctctgaaggtggaatagggggctgtgagggtgtgggaggcgcaagatgcggccatcctatcgcattttcctgttcattcacgggcgtacgcgaaaagtacggggcacagcctggatccaaccagacaataaccttgatcacagcctggatagatgatacacccaggtaagatgaaggttggcgagccgacagcgacaagccattaacatcatctgagacgccctctactagatcagaggagctagtattacggctatcgggtagttcctcaggcatagtttgcagggcctcgaggttgtcatcgtcattcgataacggtgagacatgggcttccagcgaagccgatgtcgatggtgaatcggtctgatgtgacagtgcttgcatatgagagctcgatggagtggttatgagctcaaggagtttctcacgtggcaaatttgccaatgactctggagagaagttggggaataactttcccaagatacctcgatactcttccagggtggtagatagcttttctacgtgtctgtgtatattaaactggttagatggttggggttagaataaagcaatgggcaaggctcacctccgtgatggccgtgggtctgaatagtggcactggtctgacttcttataccaccgacatgcctcacatggcttctcgccatcacacttgatcttgcgatggcgacaagatgtacaagcgcgcaaggttgtcacacggcgactaatggaatcacgcctttcactagtggaccggttacgggcaggagttgctgccgtaggattttcgaaaccctcgaatgtatggaacattgctgatgctatgaattcacgaccaccgtgtggtcaatgagtaggccatatggatcagtagaataagagtgtatgatgtttccgttgaatcgagacagttcttcacattgtggaaaggtggcaagtcatatgtgcaaggagatagaaaaaaggttccaagcgaaaacgccgattaagaaaaagcagggtaataataagaaaaaaataggctgatccgcataaatatccccgcattttgttggatttgaacgatgcaagtctttttataggctagtgatctccgcgacaactgaggtttcgagtcccgacctgcctaatatcccgggaattgccacgccagcatgaacaggggtggcagatttgctatacagaataaatctcttccttccagtattcaaacgccacagagcgtgcatggtagggtactcggcactccctggtgtggcatggattccccgaagtgaggggcaatttccccagactcactttaggaaatcatcatgagccctgcaagatgggactagacgatcgtataggaagatcactagctctgcatgtccgttctcgcatggggtccagtaccaggcaatttccctttgaccggattttccaacctgtttcgccaatcaacgtgtcaaacctcttcttagcgccatgctccgtgtgctccggagtacggagtataccataatggctctaagcccgacgccgaggcctggaatgagggattttcacgaatcaaggagcaggtgctcatttccacttatgcttaccccgtgtatcaggaggggcaaggtgcgacggcacatctcgccactggggttcggtgccgagatactttcgcgccatgtctctttcgagtcaagggcccgaaatggggacacgaacggtcaggagttcacgccttattttctcttattctcgaagcgacaaagaggccaagagagtcaaactcgaaattatttaaagccagcactgtgcagagctccacgttttgatcattgatctccggggaaattaccggggcatgccaagcctgtgggatgaaagggagccgaagggtgcaggacgcccgttgcctgccaatgttcaaccgtcattggttcggttgtgactcttgtgacgaacgatgcatactaacggtaattggtgcaataataataagttcgatataggcagtgtcatgacctaaaaaagctgcctgcgcgcggggaaggcagatggtatgcaggtccatcagtccagagagtctgcaagtttatgatatcagaaactgatggaaagaaacccgaacatcaacaatgcatgttatgttgagcttgacgggaccttttccgtggccaacaaagctcttgggtggatataagaaccccaggggttgacattgctgagtgggacctcgggagatatggttgaaattttgccgttttgcaaattctcattctttcactgtatttgcagaatacaagttgcaaatatacaggtcacgtgccacactagtcccttttggacacggccaaaggaagtctccgggcttatcgataaggacaagtcggtctccacctaactatccatggatgtataagtccggggtagaccaagcaacctcctgtatattgccaattgcttttcaaaatggctaagatcatacactctctttcttctgactggtccttcaaggatcgggacaccgacgaatggctgccagtggcttcggtcccatctgtggtacaacaggatctcattgctaacaacaagtgagctgggtttgttagacgaaacgtttcaaatctaaaaggtctctttcaacaggctcgatgatccttatatcggattcaaagaattgaacgcccgctgggtcaacgagaagacgtgggtttaccgaaaggtggtggagaagccatccgtccccgccggctctgcaattgtactggtcttcgacggtcttgatacatttgccaaggtcaagatggatgaacaagtgatcttggagagtgataacatgttcctgggccaccgagtggacgtcaccaaagcattggaagcagaggacgaacacacgctcgagattgagttcgactgtgcactcgtcaaggcacgcgagctccgatcccagcacacgaaacataaatgggtcgggttcaatggtgatctatctcgcttggctgtgcgaaaagctcagtatcactggggctgggactggggtccagtgttgatgaccgcgggcatctggcgtgccgtacggttcgaggtgtatcaagctcgcgtggccaatatttggccccaaacacagctatctgcagaccaccaggcagctgatgtaacggtcgttattgatgtggagagtgtcggtgatcgggaatatacggcccagtttagccttggcttaaaaggaaacgagattgcaagcaagactatccctgtgtccgagagaacaactcaagtaaaattcccagtcgacaaaccggctctgtggtggccccatggatatggcgagcagactctgtacgacatgtcggtgtcgctacttcgcaatggtgaacaagttgaccagacatctaaaaagtttggtatccgggccgccgagatcgttcaacaaccggacaagcatggcaaatcctttttcgtccgactcaatggaatggacattttctgcggcggttcgtgttggattccggcagacagtctactccctgctgtcagtgctgagcgataccgcaagtggattgaacttctggtcgctggcagacaagtgatgatacggtaagttttgttttcctatgtgttctcggatgtggatttagctaacgttgaacaagtgtctggggtggtggtatatatgaagacgactccttctatgaggcctgcgatgaattgggagtactggtctggcaagattttatgtttgggtgtggtaattatcccacatggcctaagatgctcgagtctatccgtcaagaggcaatctacaatttggagcgtatgcgccaccatccttcgattgtgctctatgcgggcaacaacgaggactatcaagtggcagagtcagaaggcttgacctataactacgaagataaagacccggagaactggttgaaaacagattttccagcacgatacatctatgagaagctgcttccagatctggtggctaaatactcacctggcacattctatcaccctgggagtccatggggagatggcaagatatcgtcagattccactgttggtgatctacaccaatggaacggtcagtgttctctaacaaatctcgaatcattgcgctaatcactagaatagtgtggcatggaacgcaggagaaataccaaattttcgatactctgggcggtcggttcaacagcgagtttggaatggaggcattcccccatatctctaccattgactacttcgtcgagaatccagaggacaaatttcctcaatcccaggtgattgacttccacaacaaggccgacggtcatgaacgaagactggctacgtaccttgtagagaatctacggtccgccacagacctcgaggtatgaccacccgtgatgaccaccgatgcaggctaacgtctccagacctatatctatctcactcaagttgtacaagcagagaccatgatgtttggctaccgaggctggcgtcagcaatggggcgacgagcgacactgcggtggtgcactgctctggcagctgaacgactgctggccgacaatctcatgggccatcgtggactacttccttaggccaaaaccagcgtactacgccgttaagcgggtcttgaacccgatcgccatcggggtccgacgtgagcaccacgactggagcgtgtcacacgcccaaccggccaagaccagcaagtacgaactttggatcgccagcaatcaacccaagaccgtacaaggcagtatcgagctgcggttcctatctgtcaacacaggccgcgatcttcgggctccgatcgcgcgcgaaaatatcaccattgctgccaatggcaccacggacatcatcaatggtgttctcgaccacatcgccgagccagaaccgcatgtcctcgccgcccggttatgggttgacaaccaggtcgtagcacgtgatgtcgactggccacagccattgaagtatctcaatctgtccgagcgacaggtagaggtaaagaggcagacagggaaatctggtgagacggtgttggtgatcagtgcctgcaagccggttaagtgtcttgtgttcaaggagcaagagggtgtacagcttgcggacaacgctatcgacattgtccctggtgatgagcagacagtcagagttactggccttggaagtgagcctctaaggtaccggtacttaggacaagtctcatgcgaagtggtcgaatgagtggctactacctatgctatatagcagtgggcaatatgattataaggggcagaagcacttcaaataccaggcataattctcatgaatatcaatagatgtacgatgtagtacatattagacaacgactaagagacgatcatctcatatcttatcggccctggggagatctgaacttaacaacctccaactttttgccaatgggtaccaaacgcgactgggaaggccagccacttgagctgcatcctaaagatacaatcatggcagaagcagagtcagctccttcaatcctgtcaatctttgagaacttccgcgacgagctggacgagcaccatgaccgccgcgagcgtatcatcaagaaaagccgcgacattaccgccttgagcaagaagatgtatgcctccacttccagctcaagaagagcaccactaactaggattcttttagcatcttcgcccttcaacgagtccgcgcaacgaaccaacccatcccacctaaaatcgcccaagaaaaccaaacccgcttcgaccaaatccaggcactgttcgaagctgtcgtccccgaacaattagggataaatggctggcgataccagcgccaaatcagccctggaatccaggaattcatcgaagccatctccttcgaccactacctacgcacggaaacgctaatcacgcacgccgagtgctccgcccgcgtcccaccacaaatactcatttcagaagaagactacctactgggcctgtttgatctcacgggagagatgatgcgcttcgcggttctatctctgagctccgggaatacaactgctacccaagtgaccaagaacacaacaaacgaaagcgagaaatcgccggtcgctgcgtcccagggtggcatcgtggttgatctacgtgctatgcgcgcaggatttgaggcgctcagtgtgccacagcggcattacatgttccgggatatggcgaagaagctggatgtgatgcagaacagtgtggaaaaggttgagcgggcggcgtatgggattgtcgttcgtgggagtgagaggccgagtgggtggacgcctgatctgtcgggcgcgatggaggtggcatcctactaggaaactacgtatcatgaagtatccagcaatgatcgatggcttattttgattgacagcgtagtccgttatagttcggggggttgcatggctattcatatgccaggaactatacagaacttgacaatcaagtcttctcccgcttgatgtcttaatatcccctattaataacttactccgacattttatgacaatcgcatattccatattgacattgctgtaccgacaggtgcgtcaccgtgacatcactagttcagaacggtaaagaccgtagaagcccgttgtagggacaggttgggtgtaaaaggaaaagacaaagcatttccaattgcaaaaaaacaaagcaagaaaaacgccttcgtaaaacgatcgtgtcacccatatcccatagcaccaagagccaaagttacggccatgttgactgtagacggccaaatcagacgggcgagcgtgggttctcatcctcggagagaataccctgcgaaatcaggtcttcgggctgtggccggttctgaatcttatgctcgaggttatcggccagcatgtgcttctcgagttcacgggcaggggcctgcagcgctggggcagcggaggttgcggggaggatattaccttggcgggttgttagtatattgagaggaactcaggtaccaatctcaggcacgaaatgaaagtgaaaaaatgggaaatgggaaatgatctatcgaatcagaaggaaaaaagaaaggaaaacaaacgctcaaccaactcgtccttctcaggcctcttctccaggttcttcttcagactgtcagtagcacgctggcggtcgagcacctggcgggcagattgaatcgctctatccttgtgttaacgatcatatctcacgagactcatgggactattcccgaagcactcacggagctacattggtgtccagcaggatgtggcggttcttgaggtcctgcatttccgggcgggtttggaggtgtttctccagcgagttgcgacgctcgtaggttgggggaagtgactgctgaacggaggacattgtacttgtcgcaagtaatgatagtcaaagtgttgttaagaagtggaatcagtcgaggaatggagaaggcgaaagtcaagtggtggtcccgtgggacaatcacgcggggaaagcggcggtctatacatcgacaccatatcaccgtgaaactacaccaaagggaaaatatcaagaataatgcaatttactgggataatctaggataatctgggatgctagtagatcataaaacaaaaaaatacaatccaccttcataccatctcccagcgcaaaacagaaagcaaccgtctcaacgtctccgcaatttgacgatctcccatctccgtctcctaagaaaagggtgaaaggggaaaaagggggggcacaggttttccgaagtagacatatccaagcagcgcatcacagccgcgggtcgaatccaccaagggattcgtgtcttttcgtgtccgagatccgaatcatgccggggttctgggatcgtttatgccagaggaagagggaaaagcgcactctgcaggcaatcacagcaagacagatccagatccagatccccgcattcgggggtttattgcagtccagcaaagagaaaagagacacccctgtccagttctggatgcattggttcacaaaacactccagtctactgtcatcaagagatgatttgaaggtagactgttctgctcatgctaatcaaggaacccagagcttaccccggccacgaccattgcctcgtgcaccgcgcgaagatccaccacggcgactattggatgagcggcgagaggccccagcgttaccacgggcagcaccggtggcacccgcaacaccctgttgggtactcaagtctatagtggtcggcttggttgcgccgcccagagaccggctgaaagagtcggggtctatgggcttggtaggaacttccacggtaggtgtaggctcagcaggaggtggcgcagccttaggggcagccttgcgctgacccccaccacgcgaagcacctcgagtagttccttttccacgaccgcgggggacgaaaactagctcatcctcgtcgctctcttcctcgtaggacaacagagtcttcggttcagcgggctgggcctgagttttctcgacgtatttgcagcggtttttgtactcgcgctcctcgtactggatagcggtgcgtagctgcagaatgttcttgacaccaatgccaaacttctgagcccacacctgggtcgcacggtcattggagataagaatgcaggtcttggctgaattctcggcatcggggccggcatgcaaccgccagagcagagcgctcagcaatgggcgcagagcgggcggtgcggtcgggatgacggatccggagatggtacgctggtggttagaggacttgctcttggtcctgtcattctttgttgcttcattgccggacccgtgctgggcacactcggggctggtacgggaactgcgagaggatgtgcgcgatccaggtccactgggggtgccgacggaggtgatcgacaccgtctccgggtccttcttgaagttcagcttggacaagagcatctgcgacaggtcatccgactcgttcttggtcaaagtatcgcgggcgctagtttcgatcgctggctcgtcattgtatgtctcgtcaactacctcgggctcctcttcgaattccggcaggaagaatttctcggcctcctcccagcgctcgtattgctccatggggccctggagtagaactcggtcggcagcgatgtggtctttgccggaagtgacccggtcaagaaagcgaactgcttcgcgcgcattgatggcgatctgcgaccctgctcgcttcagcgcatggagtcgttcaagtgctaattagaggataatggttagaccggcaaacgctgcagtgagacaatcaaagtctcttcaacattcgggtactcactgtagagaggaactacgagatcgatagccccattagtagtccattttttgatttcgctaatattggtggagagggccgtctcgtccacggcacagcggaagaccttgcgtccggtcgacatggcggataccaaacgtactcgttcgtatgttggtaaagagtgggagatacagggcaaagaccaccctatatcgcaagactagaattgtagacaaccgcgactaaatcggggccagggtcagcacgggcctagagctgaggaaggaggtttgatgatggagggacctgggaatgtggggggggtaaggggagtagtgggatgtcggttgatagagccatgattttcactcacgatgagaatccagttgacaggatgtttccatctgcagcatctttgtaacaatacagtctgcttggggtcaaagaacgcaccttgagaaatgatgcgatgggcagagaaggaaatatgctgactaagcgcgttataggaacaagacgggatttaaagagagaagtgagggtttctatatatcgaagagggatacagtctaagaataggaagagaaagaaagaaaagatcatgtttgtgaaggaaagggttccaaagccatcatcccagcctatgacttcaccttcttgatgaggccgtccgattccttcactcgttgcgcccactcactggttttgatgttcatattagtactagtagcaacatttgaagtacaagggaaactttgttatacttacgtccaactgccgtcatatacccgacgcaggtttgggtcgccatattcggcctcactcagagctgtctcaatgatggaggcagtcacgccagtaccacacgagctgataattgtttggtttggatccaccttgtggtcttcaaaaacctttcgcaagtcttcaacggggagataggctttggtttcagggtcgaggagttcttggaagggcaagctcttggagccaggaatatggcccgaagagaggccagggcgcggctctggatcggttccagcccagcgaccataggagcgtgcatctaggatctctatttcctctgcaccttctttgccatagtcaaatgctaactccttcatctctcggaaggagatcactagtcgcgagtcgtacgtcggaacagagtacttcgacttctccaccaccgctggctcgccgctctcagtcggaagaccgtctttgatccagagacgatagttgttgaggatatgtacattgggatggccgaaaacacgaagcgtccagcctacacgcggcgcactgaatatgcccagctcggcagtgtcgtataccaccaccgagtcgtcgcgacggatccccaattcgctcatggcctcggcaaaggtctcgcaagtgggaagcatgtgtgggtagggtgaatcttgatctttgatagcatcaaggtcaaagaatcgggcctgggggatgcgcgagttacggaacgagtcaattcccttgcgtccctctgggtcgttcggcatgaaccatgctgcacagagaggaatcacgcgcggggaagttgagatctttgtccggggattcttcttgagtgcttcattcagctgctttggggtcactagatacgaagaaaaagagacattgcgctgagtatggagccctgtggagaccgacatgttggggcggaagagacgagcagaagcaaaggatctggcagtgaaagccatggtggagaggaaagaagctttttaaaagaccaatttacataacgaggtagcaaagactcggggaaatatccaaatgcaagccagaccaaccacgagtaagaggaagcggaagagcagggaagagcaataagaggagtactattgcgtgttatggcggcatgtgtggaggtgcggagagtggacatgtgataggaggctgataggagagataagcggtgttgaccgatgctttccctctcttcacctttcttgattctccactatcccaccccacaatgaaggtcgctattaaagaatggaatgccgtcgctacttggcattggaatatccccgaggacgaggtgtgtggcatctgtcgtgtccagttcgatggcacctgtccaacctgcaaattccccggcgatgactgcgcacttggtgagtgaacctttgactcccaattccatacggaatactgaccacggtgattattatagtgcaaggaagatgtaaccacgcgttccatatggtaagactgcggagtgggcatatgagctatccctagactaatcaacactttggaaacagcactgcttaatgacctggattgacctggaatcttccaagggactatgtccaatgtgccgacaaagtaagctttactctgcattgtctgtgatatcgagctaactgtctccagaattcgaatggaaggacaaggaataacggcccaatttgtgttttcttcttctcatcaatggttatcaaggcgttgtcggacgaattcaagataccccctttgcatttttgttgggcgccaaattagattggaggagttggtgggacctcaatctcaactgagcatcaaattaatcccgtggttggagcgacttcgattaaaccgagtttatacttcgtattcgaccttccatttgtcgatatatattgttgcagatcgcgccatagattagtcgactcatacaatacccaagccccaaggagcctaccaactaccatataaatacaatcaccatgaagaacgcagaataatcctaacgtctcagggtgaaacatgtaccaatatcaaagtcgcttgatcccctcggaaggtccggccgttgtcgtctctcgtctgatcgtcacgtggcgctatcgataagaagctctccgcacgcgatacagaacctcgtcctaacctaagctcctctccagaatgatgtagccttggcctatggagatgtctctgaacaactctccctatcatcctcccctatcctcttcttcgtctaggcagtccctgcacaaagaagcactgtttcgaccaggcaccgcctcttcgcggccaagtgatcgacagtccagagggcaactgcctgagggccgctcatcaacagacgaaactcatcaacccccgggaacaactgccttgccctgccaagatgaagctctggatgagaccgaagatcattctgaggaaggccaagaaaatctgactcatcccacattccagccgttcttcgccttgattgaagacgcccatacctcagactaccaccacccaacagtccactacatattctccgacgatgacaccgagatcgtgacagaggcagccctgcgtagcttggccgcgcagcaagaagctctttccgattccaagaaagatcagatcgcgcagacccaatcgcccactctgcaggacgagatgaaagatccctccgacccggacctagccaagtccaccctactcccaccgtccgttccaggtatccgagataattatgtcattctcgacatagagccctcaccacacacacctgacgtagggcaaactagtcctataaccgaacaactagcaccgggcaaaggcgggggcggtacaaggtccatatcctcgtcaccggcgaacccttccgtgctcccacaggatcaggggcagttacacccgcagtatcgcgttaccgcggcgcagagcttctcgtcaacttggcaggttctcagtacggaagtggcgacggcgcccacctttgagaataacaattccggcgaatcaccaggacaggggttgatgctgaagatccgtggcacaggtggactgccgattgaggtaggtaacacggagaaggaccgtacactggaagagatgatggaccagtttgcaaagcggatgagcgagttgcaggttgttatcgatgctgcggaggccgtggatttgaaagaagaatataccgaagaagaagttgtgcaacatcctttctctcaagacacagctgaagagactacccagggcgagggggatagtgctgcatatgctgcaaaggttgaaggggaacattcttgatgattttatatttgctgtttttggcgcattgtgcggaacatcggctgttgtactaagtctagtctattaacaggctagaaccggtaaaccttatgaatatatcttgaatacaagatgaatcaatccaaactaggagatcgggtatgatattaagatcaaatttgacatcccgataagaatatcaatgtagttgaaccggaaacgccatgtacagtcgcctttctatggaactcagacaaaagaggagatagaagagaatgtccaacccaacactgttttctcagccaaaaactccgacccagagtggaaagccaagcgactatcgggtatcaaaaatcgacaagaaaggagaaaaaaccaaaagcaaaaattaacatggagtccacctaatcagaggtgcggtttctgaaccttcgactaccggcgatggctgaagggggcatattttcgcgaccctccttcatgccagccatcctttttgagagcatggttttggggagtttagtcccgggattgttggttgagttcgagcggcgccgtttgcgggaaggttctggctcttccttttctggcgtttcgtccaggtccaaggatgtggccaacgcgggggtttctggtttgatgggaggtagtacgtcctcaccatcagacacaaccggtctggcgacgtttaagtcgacttccctaaggccagtgttggatggtggagctgcgaatgatggaagagagtggcctacctcttccggggtatcattatacacgaatttcttggacggtgaagcatgtggcgaagtgggagcaggggaatctggttgtcccccctcactgaatggcagagcagtaaactgcttggatgtccggtgtcgagtgcgaagaccgtcgtgagcttccgtttggggcatttccgaagggtattcgtagcgtcgtttctgaggggttatacctgttcgaacatactctttcagggggcggctctggatgttggaccgcatttccaaaagtggctggcgcacttcagcgtgtaggggtgcagtagtttgttccaggttcttggtaagcatatcgacatcctcctggagttgctcgacgcgtccagtgaacgtattgagttgcccatagacgtttgagcgtgactctcggaccgtattagccatggtattcaaactgcctaggtgtgattcatggaagcggccattctgggaccgtgctttggcaacgaagtcatccaaagcctccatttgtgtgctcatgtcgctcatctgagcatcaacaatgcgcacagtctcttggtgcacagattccgttgcccgatgaattgaggcgttgcgctggtcgaaagtctactgctattagtttcattccgcaacccaaggatgtcagtcggtcttacctcccagtcattctgcatcctggttttgatttcatccttggatgcagtaatgtccttggcaaactgctcctccttgaaaatccattcatcaatgtgcctgtcgtgctgcgcagtcgcttgctcaagagagtcgcctgatgccgagatgtcggtgcgaagggtattaaatttgccctgaaggcggttgttctgtttcaggcttgagtcctcaaggagtccccggatgtgagacataagagtttcgcgctcgacttgtgcactcgcatgttcctcttcgagaacctgtgctagattgaatgaagcttttctattggcctccactgtctgacggttagctgcctgcagctggagacgtagtctgtggacttcggatttctgttcatcgatgtgctttgccatgccctcgaacatggtcttgaagtctttgccgagtgtgctgtatgacgagtgaagttgcgagtgaaactctgagaactccccaatgacctcttcggagattcgagcagcagcagccgacaagccattcaggccttcgccaactttggacttaacctcttctcggaggaccttgatctcctcgagaacttcattcatcttgtcccgggcagtggatgtgttattcttggcctcggcctcagcattgtcaaacgatgcatcaagatccttaaggtgggagcgggtagaccgcacagtgtcgagttcatggtctacgaattggtggatcttgctagacatctcctcgagcagcttcgcatgctgcgtctggaacatctgcatgcgagcatcgactcgctccgtgacatgcgatacctcaccggttgaagcctgccatgttttttggttatcagtctccaggttatctttgcgatccagtttcgcgtgcagtccattcacgtcttgaatagttccatttaaggtagtcaccaggccggcaccaatgtgacgaagttgcttttccgtattttgatgagccttccgcacaatcttctcctcgtccagcttctcctgggtatccttccaaaacctttctgtttcgttgagcacatcgcgcgtttctttgagtttggactcaatctcctcattgttatgctttaatgagttaaagttgcctgtgatcaaaagtagctcttgaaccttgtggcgaaggcttgcctccatcgactcgatcttggcacgctgttcctcgttgacgatgcggcgcgactcactttccatcgtcatttgttcaaacgcatcaggcgtcatatagacaccattgcgatgccgggtggcaatgagctcgcttttgagcttctgaatttccatcccgatatctcgcagaagcttagttttggtgattatagaattaatctggggtttgttgcgaatgttcttggctcgaaaggcataatcaagggtagatatggtctcctctaggttgcttcgggcaggcgagacggtggcgatgatgcatgtttttgtttgccctccaagtgaatcttgtagcagtctcgtaagtttcgactcgcggtaaggaatgtgggagctcttatccaccagagcgttgatcaccctcccaagagtgagtagactcttgttaatgagacctgcctccgtcgcccgtttattttctgcaccgctccgtccgatattttcgctacccgcgagatcaaccaggttcaacttgcccgagctgacatagtcctccccagattcggtcgtgcgatttgtgagcacggtgatggtaaaaactgtatggcttcgggaactcaggtcattgcattttgtcgctgccacttggcgtttatggctgcccgattgaagtaatcggattccggtggacgcagagtcgatgtaagtctcctccatgccctgaaccatggtgccgtgtcctcccttcttctcattttcgaaaatcttgagcttggtgctatcgtcgtatgacagaagatcgcgaagttcttcattataaagttcgataaaggaacatttcactgtgctttctgtgtcctccagcttgcgaaagagggcgtaaagcgtacgcggaataattcctgcgtcgtcggagaggatgcccaatgtgtcattcatgtctcctgacatggtgtatgtctttcctgttccagtctgtccgtaagcgaagattgtgcaattgtaacctgccaacatctgcaaggaattagcgcggtcctttgggttcagtcgcggcgactatactaacctcgtcgaggaccggtacaaccacatcctcgtagacagtagcttgatcggcagccggggagaagaccttgtcaaaagcatatgtcttgtttgaaaccgcgttcggtcccatcgagagatcgagggttttgcccttcacaccctctggtgttgacaagactacaccgttattctccttaatctcgcgatcactgcgaccgcgacaccggactaccacatggatgcttgtgtcctcgttgatttcccgttcgaaatctttctccctcctcttattcgcagcgcccgatttttctgggctcctcgccacacgagctgcacttatcgcagaggacctcactgatggcgtagacactccaggtagtgcatggcgttctggggctgccgaacccgctcgtcgaactggttggcgcaaacccgacctcctcgtggtggggagggtggatggaggccttggtgggccagccatgttgacaatgcgacactcggaatgtaattgtggtattatttagcagtaatattcgagggtccgtctgaaagttcagttgatcttttgatttgatattttcacaagctgtgtcggagtctttcacggttgtgtatatcagtggagcttcgtctcaaacaggagcaacataaacaaacattacgtaatccaatcatttccccctcgcacatgactcggttggtcggctgcgctatcgtcatcgctctcttatcgttatccttccccctcataccgtcccttacatctccagagcctccccttttaactacacaaagctcgactatcgtatggacttttgtccacccatgaacaccgggccatgaaaacgaacaaaccatcatgactacctctacttcctcagcccaggcgcaaatcttccctgggaaaggactggggtttatcagtatgtttctttgtctaacctcgcagccttttcagcagctctcgctaatactcttgaagccttgggtgcttcgctccataatgtccttacccgcgtcaagtcctatccccaaacctatcccgccatcgacctagcctactcccccgcagatccgctccgcaagccggtgatattgcagttaccttcaaatggcctgcgccttcgatttgacggtcccgaccagaggctccgtttgattgaagtagtcgacttctctcgagtaaacctggtatacaaaaatcaggatgtgctcaaaggtgggaagtcagcagaacaacccttgtcctcgcacggccctagcttccggcacgtctacaatcgcttgtttggcccctcatacccaggagaatacgtacccccggcagacccacagtcgccatatggaacctacgtcctttcttatccgggggttgcattctcgtttccccttcagcactctgcctggtcagatcagtgtgattttgtagcgttgctatcttcctcagctgcgctcccggccacatccatgtcgatcttccaaggggcatcatggcctgaggcccgaggcaagttgttcacacaacaggcacagtacccacgctcgtcggctttgattggaaaatcccgagaatcgctagcggatgaaatcgaggagtggcatgtcctaggtgctggggaacttcaagtggctcgcaggacgggctctccattatacataaaactgggggagacgactccccaggacttgattgcagacttcggtccacccgacgcagtctaccgtaagaacgaccgccggatctcgatccaccgtgcaactgggggtggggaatctcacctgagtccctctccgggcagaggaatagacatcccggacggcgaccactcatccactaacagcgtaactgatgattctgacgaagagttggctaccttcaatatcggagaccccacctcactgcccgcagaatgctttttgaactacttccaccatggattcgatgccttcatctcgtatccgactacacctggacctgctttccccgcctcgggtcttccagatccatcgcctcagccaccatcctcccagctgacagtgacaaagattattcttcatgggaacgtcccaggttcttatccatttaatcgtcaccgccgaagtcgctggttaatctcgttggatgaatctggcgattgtctgacttcggaatcgacatacgatgaaatctcggagcggctgcgggctacttggaaaggatcttacgccagccccgccgaggagcgtgctctgcagcggccaatggtactgaaccgcggctggggagacagccccgagagcagtgttgagttccttggtggttgggaggagaccacagccaaaggtcctcggaatggtgccgatgggcaggatggaggattaggtaataccgagctttttgggttcccggggcttttatttgaagttctcaagaatggcgccgtgagttgtttgacagtgtactgatttaagactattgcacccagcgcttctcaccatatctcaatgcattatgaatcatgataatcctggcttggtatgttttaatgtgaaactatatgtgaccattcaaaacctggattgtagatgtaaattgtagaattgatacctaatgtccattctccaatagcctcgcaatttccgtttgattcaaatttcttgcccactcaatgactgtacaaccatttccatcctcgatgttagtatccgctcctcgaccgagcaagaaccttattgcatccagtttcccaagctctgttgctatgtgtaaaggggttcccaaactcacaggatagaaccgcctaaaggttggataatcctgatacattgggacgttcaaaggggcacctttatcaataagtagcgccaacacttcattgagatttgtccgccgataaatggcatattgaaggagctgtccctgttgtacatcacctccgcggcttagcatgagctcgatgatgtttataagagctagctggacagcataagatagcggagtacagttaatatcacatcgttgattgggatttgctccatggtctagaagccagttcgtcatctcttcctcgtagattgcatagctatggtaacgagttattattgtgtttcttttcaagaaatgaaagcaagattctcatccttcgaatcactgactttagaacggggggatcaaggtcacttatacgttcattgatgtcccatcctttttgcatgaagcatttgagcgctttcttcgatttacatttcattgcttccaatggaaaatatgaatgtatcgtaagcccacggtcgagaagttctgaaatgaattgagtattgtcttgcttgattgcctctaccatcaccgggacaagttcctgtatgacatgtttcgggctcgagggcagtagagcgatagtatcattgaaggattgtatatctcctctgaagcgaaatctgtcaactgctcggttgtttctttcgggatttgacgtgggatgtgaaattgatttaactcgatgggtgtaatagatgagataggtggctcacacaaccatgatcgaagatccatgataacacacaggttatctgtgagagcaaaaatgaagtctcctaggaggtgtgagatgtacgacctcagcggggttgatgatgtacgacaggtctcgcagtgggcttttgccatcttcccccctctaagagatcggaatctcgtataactaccaacagtaagcgataatagatatgcatctggccctgtacattgaccgctagttccccgttgatttgtttctcttcctataaaatcctacaagcagaaattatatcccttccactcttactcctctgaagtcccgggagatttggtccctgtctctactccatcgattgttttctgtttggcagtgatcatgtctaccgactcagcctcttggactactgtccaggattttctgcaaaaaagtgatagccaaactgccgagtgttttcgtcgaactcaatgggatgagctctgtccaatcgcttcaggtcttgctggacacttggagtgcgtggccttagaccaggttgctagcgggctcaatcacattgtccgtttgctaaaattttccgacgagactcgctgggcggcccgggttcatattagaaggagtacctccccccttgtcagcaagaccagcctcagaaacgaggttgcgacaatgcaattcatcaaggaacgttccgtcttgccagtgcctcaagtctttgcgtatgaagttgacgagaccaacccggtgagggttccttttatactgatggagctgctccctggtagcgtcgccatggacgccctaggcggctacaacgtccatcgcggtataatacccagaaagctccgaccaaccttctaccgctccgtcgcaaagtgccatgttcattccccccgcgctatcaagcctatataggctcacctcgatagtcagctgcttacctcatcctataggtccagttgacttcgttacgactcccaaaaattgggacgattgtccgaaaccgcgacggtaggtacgagtgcggtcccttaccgggaatcggcggtccattcgatacagcaaccgaattcttcgaggcgtgggccgacagcgtcgagtttaagtgggataaagagacaatcacaagtatgatgcagagaagtccgaaccctgcagaacggatgatcgcgattatcgagaatttcccgttacaaatcaaagctatggctagccggctatcctcgtgtaacgaagggccattccctctagaccatgatgacttttttcatagtaacatcatggtggatgagagcttcgatgtgacgggaatcatcgactgggaaggcgcatgtacggttccctatgagcttattgcgttccccgacttccttacagccatgcctgtctccttcgacctgccccagaaatacgatgaagatgggcagccgttcgatgaggaaattcgagaaatgtggcgcgagcgagaagggtatatcgaaatggtcagattagccgagcttgacgacagtgtgctttcggattgcctcagcagcaagaggagccaggctatagcttatttgtatggggcgtatactagtgttggaaagctgggcttttatgatcaagctgtgaaagagatagagaggggagaataaaactcagcagttcccctatcctggaatgataaaacgaagctcttcgtagagttattgggcggtggaacagcatcaaagaagcaatttcctgactcgaccgtactttcgggtgggatactccttggacgagccacattgagagatcctctgcttggtaaaagactctgggcctggaatagaaggtgaatgttaggcgcgaccatgcagtgtccgatcaagtatccaagtccggcggagtctaaaccctttgtggaatagccatgttttgtaaaccgccaagacccttctcttcttgaccttccactcatcactttctaggatatgctggacaatgccggaactggcgcgggcaatccctcgctcatggacctcgacgttgaaactgcctaaatcctcattccctccacgcgtatcgcctatcgatcggacgaaatacctaaaacggtgcaccgatgatctctacgcctggcaacgccgcgaaaggcccgccgaccaaccattcgtcttgcatgatggcccaccatatgcgaatggcgatctccatgttggacatgcgctcaacaagattttgaaggatattatctgtcgcgtacaattaggtcgcgggaagagggtgcggtacgtgccgggctgggactgccatggactgccgatcgagctcaaagcgctccaaggcctgcaccctgaggacattgcaagcggatcagtcagcgcagcggatattcgcacgtccgcgcgtaaattggcaagacaagccgtgaaagaacaaatgaaagggttccgtggcttcgcggtcatggccgactgggagaaccactggaagaccatggacaaacaattcgagatgcggcaactgggtatcttccgggaaatggtggaccgtggcctcatctaccgaaagttcaagccagtttactggtcgccttcaacgggtaccgctcttgcggaagcagaactggaatacaaggaggatcacatctcgaccgccgccttagtcaaattccctcttatcgatatccctacgtgtctctctgagaatcctcttcttcgtggaaagaatttgaatgctgtgatttggaccactaccccttggacgctgcctgccaatgctgccattacaatcagcgagtctttggaatacgctattgtcttatcggaaaaacatggtcatcttctgatagctcaatcacggttagagtacatccagaatatgctgaaagaagaactctctgtcattgtaccgtctatcatggggtccgagctggcagagcgaactacctatcgacctctattcaaaggacccgaagctcagccgcagcccatcttcgccgcggactttgttactgctgattctggctctggcctggttcatagcgcgcctggtcacggaatggaagactacgaagcatgtcttgcgcgtggcattcctgtgttcgctcccgttaacgatgagggcaaatacacagataaagctatgcccctcgatcctacacgtttaactggaaaatctgtcttgggagaaggtaacaccgctgttttggaatgggtcgaatcgtgtggtcagttgcttgcccaacataagtacgagcacaagtatccttacgactggcgttcaaaacttccggtcattattcgggccactgagcagtggtttgccgatgtggccgatatccgtggcgatgctcttcgcgccttggaagatgtccgctttgttcccgagactggaaagcaacggctcgaagcctttgtgaaaaaccggagtgaatggtgtatctcgcgacagcgtgcgtggggtgttccgattcctgcaatctatcaccgaaccactggagaggccgtcttgactaaagatagtatttcacatatcatgaccacaattgaagagcgcggaatcgatgcttggtggaccgatgctgcggatgaggctgcatggattcctccgtccttgcgggacgaggctggagcggggtatcgacgtggaatggacaccatggacgtttggtttgacagtggtaccagctgggcagagatcgatgttcctatcgaaggacggagtcatccagccgacgtgtatcttgaaggtaccgatcagcaccgtggttggttccagtcctctcttctcacatatatctcgcaccagctcggctcgggtcaattcacgacgcctcgtgcgccatacaagaacctcatcacgcacggtttcaccctggatgaacatgggcggaagatgagcaagtctattggcaacgtaatccacccgcagaccatcatggatggaactttgctgcctcccctcaaaccccgcaaaggcaaaggaaagaagcaacccgagaaccaagaaccgatgtacgacgctcttggccccgatgcgcttcgcatgtgggcagcgagcagcgactacacgcgcgacgtggtaattggaaaacgagtactccagaccgtcaataccagtctccacaagttccgtgtcactttcaaactgctgctgggtgcccttgccgatttcagtccagcgaacgttatcccatatgaacagctgcagctggtcgatcgaattgcactcaagcacctctcggatatggtactcacgtcacagaagacaagtgataacttcgagttctacaagggcgtgagtacgatgaaccggtgggccaacctcgagttttctgctttctacatggaggcgatcaaggatcgcctctacacccttggtgaggacagcacgagtcgccgggctgcgcaaacgaccttattctacatctacaattatcttcaagaggccctggctcccatcacaccagtgcttgtggaagaaacatgggaacatactcccgagtctatccgcaccgagtctgagcacccactgcagcgtatcgtctccgcccccgctccggagtggcaggatttgaccctggacaccagctaccaagagctgacggtggttcactctgccattaagaacttgcaggagcaggcccgtagtaaaaagcagcttggctcctccctgcaatcctttgttcacattgtgctccccagcagctctggattattccagcagtatctgtcggagctccctgatctctttgtcgtgtcttccatcaccctgtcatcccacgatgaagctattccgaccgacattaaggacgctgaatggcaatatgaggagacatttgagctaggtgaccagccaggcaaagtgtatgtgtacgcgccacaggcctccaagtgcccacggtgttggcggtacgccattccgaacccggtggcgatcgaagatgcgatttgcaaccggtgtgagacagtgatacatgaggcaaacgcctagagaactgtacaaaatatgtatacttatttctatgtattatagctagctgtaggtgattggacagagcagccaatttaccaactgcagtgcaaccagtaatccaaaacatccgacattcacattgaaaactagactgaaagaaagagtccatgtaattaatgtattcaatctatttgtccatccagtgaatgttctaaatggctatgacgacagtatccagtcaatgacggtcgccccaatcatccccaaatcctgctttgatgcaacatcatgtcatctatatagtcttgctcttctcgtttcttcttcttcctctactcaacttcctaaattcatcatgattcaacctccatttgatcagtttgctactctaacggcgcccgccaccacgtcctcggtggcgcctattcccactatcattccggggtatgaggtctaccaggaacttcatgatacaggcaagcgaactctttggtatgtatatattatactatgtattcaaatgtttaattatcctaacatttatagggttgtcactgtgttgatgggcgtttcctcgctggtgttctatactttggccgctcgtgctcctctagtgagttcatctcttctatatcatatatgctctcttctattattcatacctatctaacatatgtccagtctaaacgaatctttcatatcctcacctccctgataaccacaatctccttcgtgatctacctagctctttcaacaggccagggcataataaccaaacacgacagagtccacgaatcccacaaacatgtcccggacacccacacagactacgctcgccagatcctatggctgcgctttgttaactgggccatcaccacacccctgctcttcatcaacctcgcccttctatccggcctaccaggcgcaaacctactcatcgccattgtcgcccacctgatcatgcttacaacagctgtattcggcatattttcaggacacggccgcgagcgctgggtctggctgaccctcacatgtatttcttacctggtcgtgatccaccacattggcttccacgcacagcgagcggcgaagagcaaggatatccagacaagacggttctttgggtctgtttctgggtctgcaattgccatgttggcacttttcccaatgtgagtgatatatccaaaagagcactcttgagttcaaaccgatgctaatgttgggtagttccctcgcggctggtgctctcgcgctcagactgagtgttgacacggagactatccttttcgctatccaggatgtcttcacgcaaggtatccttggatactggcttctgttcactcatgagagttcgcctggaatgtaagtctcaagctgaatctcggtatgacgacatgctaattactgcagtgcactctacatggaaggattctggtcgcatggtgtcggcaatgagggagctattcgtatctccgatgaagagggtgcgtaaggaaataactccacacattcagactaggattctggtgataggatatttgttctctcttttttttttttttttcagttgacatttctctcacttacgagtcaatttggtttaaggcgttaggattgaaaatgagtatcaggatgtttactttgacttgaccctactatttcatatgtctgttctacttattgcgtactcttttaaataagaagcagaataacttaaaaatatttgctttttttggggggttttctaaattgtctttcttgcgtagttgaatgatatttccctggcggcacactcactagagccccctagggaaggctctagcgagcgtgccgccgcccatgaacacggaccccgtccgtttagaacacccccaggcctcgcactgcggaagagagctcggcaagctcctcgtcactgagctcctcgacggagttctccccggagggcccgtcttcgccccgggccactccaaactcgcccgcctgacgaactcggacgtttcgctggaagcgagggagccagaaaccgcagtcgatgcagtccttcttgaagtgaacctccttgaggttccggaaccacatgccaaaggggtccccgtccaccgcgaagccgctcaaggtgagatgctcgacgggcaggtaggtggggacggggaacccagtggcaagggcaaggacctttgccttctcgatgcagtacttgtcgaggtactcgccgtacccgaccttggggctgacctccccgtcgccttggccactaaagtcaatcaggttagcatatgtcacgtctcttggtatcacattactctcagttgggcacaacttactagtatacgggtgaggcatgcgacttcacattcatcacccagcccttcttgatgggctcccagccacttggtcccaccggctccacaatctccaagccaacagccatgtgcagctcgagagtggtgagatgagggttcaaccaaaccgtcttccagatggcaggctggtaggacttcatcataccaaacagcttcagcacacgcaagttgcggaactcagtcaagggccggacctggtccatggtgagaacactgactttgatcttgtcctttaggttctcgaagaagcggtcgtcgtcgatggtattgtccttcaaggcctcgttgatgatactgctaattgtttcatcctccttgggagcagcgacttcaatgacttcttggtcggggtaacgaggcgcgtcacagatgggaagatcttgcatcccgaactcattggcattgtacaggtcccaatcgtggacagcggccttgcctttcgcgttcttgttgttggtcgggctttcggcctcagagctctcgaaatcgaacattgtcatcgaggagtcaattgccaagttgccatcggtggtctgattttcgatagcacaatcagtgttgaccccagcctgctcagtggtgactggcctggcagcagacttcaaggtgggagcattgtccccagcggtagcaacacccgtcagaatatcatcagactgggtggccttgtcagcaggcaggctgtcgatggcagaacccttgatgtcgggctcagtcatggtggcattgtcgatcatggtggtggttttgacaggacattcgacgtcgaagtcggtcatggtgcccttgtcgaccatggtgacctcatcagtcatagcaccttcatcaagaatttggtcatcgtcgagatcaacaatgctctcaggggagaccttgcgaacatcgaaaagcatgttcagttctaggaccaacttggtgcgagggatatcatcccaagtgccaccatcattgaggtgagccatcaagtggacgaaagaactggtatctgggtgaggaggagccatagtctcaggttgaggatcactctgttgctcaagccagtcttgaaagctgagaatgctgagatggttgggggccactgggtcgcaaggataagagtcttcagaggcggtgggaggtgcaatgtcgatgttggtagcagagggtcctctgtagagagaacggaaaatgggacgtggagcaggagggagtgggggaagagaatattcaggagggaagaaagttgtaggggacaagatggaaggacgtgtcggtgtgggcttctggagttcaacaaaaccctcagtggacgcgacgatgggacctcggtgtctgagactcagactcttaaaggaaggaaggcgccaactaccctttttggaactcttcagactctttgtgggactcttctcaggtgagttggtggtatcagttcctgcagaggagtgaaggaatcgaaggttattgaaagaagcaagtcgagagagtgggaaaagactcttcctcttcgttgggctctttccagaagcgcttgtgactgtcgtctgaacagggtccttagcaggcgactgagcaggtgactgaacagggcttagatggggcggtagggctaaatggtgacgggagcattagcacgaactatagcaacgtatagcaaccagcatgcttgcatgtaaggcattcaatgtagcaatgctacgatgatgcagcacatgtaagaacgtgtaagaacataccttttctttcacctgcagtaagctgctcaacatgttttgttgcatcttcccagaaacggacacctaggaggctgttctcccattgatcacgcatatcacgatcatacatgctatccatgatgaattctggattaacaacaatgaaatttggatgaaagcaagtatctgaaggataggaaggatgggagaaggatgagaggaaggggaaaaggatggggaaaaggtacttcgcatgggtgctcttcaagcgtgcgctccccgcgttaacaatcactgggcttaggtaccatttgcgcgagtaaagccttcgctgagatcgaggtcgagggctccggatcaactctacacgttcagttaaaacagtcctcattatcacactacacgtcttcttcataggatgtggttcaacaattcctgacttatcctctataaaggctaaaaatatagcacagcttcactggttctgtcttctgtcttctaaagtacgttcaaggaagacaaggatatcctcaatggctcattcgagttggagaatacccaggcgtctctgtagttgccagttagagtataaaagcttcgttcgtctctaatagtctggatgcaatttactatcctggtagcaattgtagctatacaagaagttgcttctttgtgttcatttaccttaagatgttcgacactaacaatctagttatggcgtgatatttattgtaaataacaggtaaacattctcctgttgatatcactggcaataaaactatccggggcgatacctgtttttaaaaggtgcaatgcttcaatgcgtcaatagtacatactcgccgatcttggtcttttaggtttaggctagtgacggcccgcgacggacacccgccggtccactacctgaggacctaaggctccgatgtcctagtaacatcctatatggccttctagattcattggaactagtctagtcccgatggtcttctggtcaattaatccggtgcgttaagaaatgttgccgaggtccattctgcaattatcagcggaagggcgaggtccactcagacagacaacgctggcagagaagagaagggtggtgttgagaaatggtccgatactaagaaatcattggctttgtaactgatggtgtataggattcttctatttgatgaaccctttcttggccttctccagacgaccgagacatgcgagcatccgtcacacgtcgctgatattcttgagactgttggaagacagcatgatggtttttttactgtcaattacattcgccttcgctttgttgttcaaaagacagagcggcaccactattgcttcaggaaattccaatttttagatatgatttatgatatttcttgcttcaatcgacttgtgaagccccgaggagaatgtatgaggataaaaggaatatactgcgtattccgataaacgaacagctgcctcttccaaggagcagctggcgacgttcacggtggcaaggccacgacgtggctgcttttaccgcgcaacctacccctgtccggtaaaaggtatagtagtagctaatggcgccgagcgagcgatcgaagtacaaacacacgacttatttacattacaggctactgaaggtgcgggagcatactcgctccattctattctctatctcaagtgataaaggtggcattgctcgggtccaccgggtctatgtcggaaagcccttacaatccagaaggattgggaaacaaggtcaagagacatgatgtaactcctgagatgaaacaaaaccagaggaagatgaaggaatcgcgtaagaagctaaacctatttggcttacagcctaatttggtgacccaccagtatatgcctccagggatgtgagaaacatatacatgtaccggataatgcctggcactcgagaccttcccctttccgttttagtgttcactgggtgagcggcctgagtaagctacatcaataaaatgcgacatgcttgccccgtcacgtgcaactcttcccatttagaagtaggttgtcgatctgccagcctgagcctaataaaataaactactaggtggatatctgtgaaaaagcaagctttgattccaactttctaacaatacatgtagcgataatgctcaggcccccagaaagacatggcggcagcacgcagcaagatcctcggccgtgaatgtgtgctcaggctcccagaaagacatggcggcagcatgcagcaagatcctcggccgtgaatgtgatatttccttcccccgtgttaggggtcggcaggcggcgcataacggattcgaaatccaagtgtagaggggcattctggacattgtttgaggtaataacgacctcattgaccgctgaatgacgtagcaccattggggagtctgtttgagatagcagagtgcgctgggcctccgcctgtagtccacgggtgaatctgggagtggttggtatcagactgtattgttttatggtgagtctgcgctcgggcgatctttggatgtggaagagaataaccatgttgactttgtagtcggaatttgagaaccaccaatatgcgtcggctcgtagttgggcttctgattcagaaagaccagtttcaataacgagcgaaggccagttattattgtcaaaaggatttcctgacggagtaagacactcgtcggcttctttatcgcatgttcttccgtgatatcgggtagccgagttcatagtgtaatcatccgaatcaattcccatttcgaataattttaggacgagtttgtttgaaaatgatcgcgtcactcgctcatgagctcctgatggtatgattcgaatgaccccttgctggtgctgtgtcgagtgtcaatctgtagggaacctcaagagggtttcgatctccagctattagctcctgcacttgctgggatatgtttgacacgatgataaactggttcgagtaagacgtgttggtgttgatttgatgatagacatcgttcgcagtttctcgaagggtagaaatggaaggagcagacaacaccacagcacccgggatctcgaacggcaggtgcgaataacagacacctgcttcctcgaccttgacctgcgaggttcgaggcgcaacatctgactcggtcctatcgagggacttcgagtcgacgtcctttgcagctaaggaggaggaaactgtggataatagcggagacagcatattggcgaaataggggtgtatagcgaaaggaagatgaggcagaagaagagaagtgagaaggctattaacaaagggggactggtagtgtcatcgttacattgaataccggtctttttaccggacacttatgtgacctaaaagtatgcattttgcttatcaatctgcgtacaaattgtgtaaattttgcttagagaatttactgctattgatttttacccgtacgctcgtcatacctggatttctgtcaagtagtacctatatatatcttagatgtactatcatgtggagacctttacttcaatctaaagatacaacatactccaatactacataacttaataccgatagtatcccttagccagtgtcagatagacagcctggaccccagagtagtgtttgtttgcacataaaagctgcctgggcgacctctctgtacgtctcatagcgacattgttaggctgcatgtcgaaaatttagacttgaactagaagttagttcacccaaaatcaatgtctgtcaggtaaaaacaactactgccctactacaaaattactgctcaaagatcaatctggctggcaaatggcccgtggacttcgctattttgtgtccctccccaagataaatacatccagagcggtgcggagatgtctctcgcacacacgaaccatcttttaatcaccaagcagagggggaagttttaaaagaaacccattgaaattgtcgaacaaaaatcatgcatcatccataacctagtacttcttgccctggcggaggacatcaccgaactcctccagagggctgcggatgagcttattctcggcccacaggttgggggtaaggaaaccgtaggtgttgacgacagcgacgaaggtggccttgagggtgttctcgagggtcttggtggagccggaagaggaggtgtaagcgtcctggacaccggcgagctggagcaaacgcttgacagcaggggaagcgacaaggccggtaccgcggggggcgggaatgagctgcagtcaattagaaaccatctcttcagatgtccggccccaaaaaggactagatcagatataaaccaccgtaggaaacttacacggacggagacggaaccacactttccactctgcttgacgggcagagagtggggctcaccaaggttggtaccccagtaaccgcgacggacggggaggacagcgagcttggcgatggtgatagcagcacggatggcggtagcgacttccttggaggtcttgattccgagaccgatgtggccctcggagtcaccgatgaggacaatggccttgaaacgggtacgctgaccggcacgggtctgcttctggacgggcttgatctgtaggttgaaattcacgttagtttctggactgatttcgatgtattcgttttccgtttgagctttcattgcgcaattgcgggcaattgtcgcattccagtcgagtcccgctcaatcctccaatttcaaaaagggtgtgtcgatccgtaccttcataacctcatccttgagcttgggcaggaagaagtcgacaatctggtactccttgacgggcagagagtggaggtagatctgctccatggaggtgatcttgccggccttgacgagacggccgagcttggtgacgggctgccactccttctcctcctgcttggggccacgacggccgcgacggccaccacggccacgtccacgctcaccaccacggtcgccgcgcgaaccgaaaccaccacgtccacggggagcagcgtcagccatattgatgttgttatgggaagcgacggggagggttgtcgggattgagttggtcgtcgagtttcacggcgctgagcactgtttgcccgaaatttgcgcgggtgggctaagcgagcgggcagccctagtggggaccctatgccctaaactcccgatcgggaatgtggcacgtgcacttaaggtttccagggcggtgtcacctgatggggcccagaagtaaatggattgatcgccgttgttgtagagaggcattgatcatgtagaatgagggatagatttgcttatggtgatgttgaggtcattagctatagaaatatttacaaatatatcgtgtttttcataccaatcgagtcccgcaatgttgttattctcactgctacgtcacaaaatttggtgcaggcggatgcatttcctatttgggcaatgcgacagggactccgcaatttcaagattgttcccccagttgcccccagttcaatagtatttcagcgtctttcgtctgctttttgttctttctttgcatccttctctgcttgttttgtcccttatagccatccaatcgcagttatgctacgctggtaagtctctcttactcatctccttcaatcgcagctcataacattcaaccaggtaccagtctaagttggcaaagcggcctatcctcaccgcaagcatcaccagtgctgtatgattctctcctttctcctttctctggaccagttcctgactcttgttacaacagttcctattcggtagcggggatgttctagcccagcaagctgttgaccgaaaaggtctccaagagcacgacttcgctcgtactgggcgaatggctctatacggtggaggtatgtctatatgtctcaagtgccttgtacattgctgatccgtgtcttttcagctgtcttcggtccggttgccactacctggtttggcatcctccagcgtcatgtcgttctcaaaggcactgcgtccaccaccgctgctcgtgttgccgccgaccaagtcttctttgcccccacccagctcacatgtttcctatcctcgatggctatcatggaaggcgctgatcctgtggaaaggttgaagactgcctttgttcccgcctacaaggccaacctgatggtctggccatttgtacagggcgtcaacttcacatttattccgctagagctgcgcttactctttgtcaacgttgtcagtttgggtgagtaatttgcttcgaggtgttgctgattatgctcctggctgcagtcactaacaactaaacagggtggaactgcttccttagcttgatgaacagcggggaggaattataattccgaggcataatttgagatacccttgatgtttttattgtcggctttctgcttttcacgtcggcgctccaatacgaaggatttttggttgggttattcggtctttgggcatcgtgttccggaattttattcttcaattttcggccatgtagaatcctggacagtataaatgagaataaaaatattcaaatgaataagaaatgaatcaaaatgatttgaagacaaaataagagcaaagtgaagatcggataactagttgggtgtgatagtgattatgttacggaagaacccaaagaggcaaggcaagtttttgtggctcgaacttcaaaacttccactctttgcagtcaattgtcgcccacctccactctcatctcacactgcctggagcagactattactgctaaatagatctaggcttggattcctgttaccttctttgtgtgaaaagctctgatttgcgctttccttaaaattctcgcccctccgactttccgaactcgatcgtcttcccctccacatccattcaccatggctgccgtcgcagaaaacggtactcccgctgtggccgatgagaactccgcccctgtcaccgagactcagactggtgatgccgttaccgtcttccacaaccccgatgacttcaacgtgaagcaccctcttatgcacgaatggactctgtggttcaccaagccccccagtggcaaagtaggagacaccagtgggatagatcgacgtcagcatgcttaccaatggaacctagggcgacaactggaacgacctgctcaaggaggtggtcactttcagctccgttgaagaattctggggcatctatgtatgtccaaccggacgtctccctcgatcgacaataacactaacctcgagcgctattagaacaacatcacgccgacctccgaactcggcctcaaggccgattaccacctcttcaagaagggcgtacggcccgagtgggaggacccccaaaacaagcacggtggaaagtggtcataccagttcaaggacaagcgctccgttcctattgacgaactctggctgcacgcgcagctggccgcgatcggcgagaccctcgagaatgacgatgacaacgaagtgatgggagtagttgtgaatgtgcgcaagggcttctaccgtgtcggtctatggacacgcacagtcggcaagagtatccagggagacaagcacacccgcacacaggcgcagggcaaggagattctcgaagcaattggccagcggttcaaggacgtgctgcggctcaacttggcggatgtggtggagttctccggccacactgacagtgcacacagcggcagcacgcgcgcgaaggccaagtacaccgtttaagagggctggctgagacggtgttgtgcagacgaggatgaaaaacgaaaaacaggggacggatggcgatgcgcagatttcacgattacggacgacacgaatcgaggggaattgactcgactcgatgtgcggtgccggaaactggggatgattcacatagggaccgaggtaccccccctttatgccggccccgctgcatagttctgcagggacgaactgattgcttgcgacttgtatcttactctaccaaacacattttacgaggcttatgccatgattaaggtcgaggtcgtgccagtatgatggtattttccctacattattctatacaaatatgacctgttcatggatgcattcaacttttggtgttgcgtgctaggtcgggtttcgcgagatcaagcccttgagtagagctgctgcttttggatggcacatgctgagaggtctatatcagtagatgtagctagaggtgtttgaccctcgtcgcatacgtctgtttcttgtctcttctgaccagtgtcgcgagtagaaggtcttttagggcttctaatggaacttcttggaatgcatggccaaagacactttagtactatgttgtatgctgcaggggtgctcaggggtgcagggcttcgaccatgttctgcggatttacaccgcatttacacgatcctctcgcaggacactgttgaaggactcatacactagcacacgaatattttctcattaatatcctcatcatgattagaccagaagacaggttttactcaggggaagttatttggcagacgggtgggcgtttgagacaggttgcactggaaaagggacaatattgttttcaatggcaaaggccaccccaaagtaggctgttgaagaaggccaaagattgcgtgcagtgaaagattgctcgggcagcttgaactaaaaccaaccatttgtcagatagcagaacatagtcacaaagcagaacacaaggcagaacacattatatctttgtgtaaatctcatacttatctaaaaatttgtcacccaacatccaagtcttttttgagtgacgaggctgtatacttgtgacattcaagacaggcaattggctctctatagggattataggtatatctcgctataggttgttaccctctcaagaggttatctaccaaacgctgggaggtattataggcaatgaataacaatggtagcaaagagaaggaggggagatggacgattggtctttgagagtgtggagtagataaatcatcagactaatatactggacgagcttgatatctactttccgaaccatctgggataacaagaccctcctgcgaaagaaaggtgaactgtcatgggatcgcatctccgggatcgaaaagtgtctcgacccctggctgataaaccatgaaggtttactggctaagacaactaacctcgtagactgttactacttcgacaacctatatggctagttggagagggctgaagctctctaaacaactggacagaagtcgtcatcgtcttatgcgaccgagacgttgccagcgcaactagctaactagctagacctcgatcattgtagagaatctatccttcttcatctctctcacttgttccaagaagattcaacaacccatgaatgcgcaaaattgatgaatctaccagaatcgcattacccactccttatgggagcggaaggacctgcctagaagggacagaacatcatacaacaaacgagaagggcaatcggcccatgcagaaaaccagaaaggtcccgcacccatcagaccagggtgttcaggaaatccacggaatcagcatcctcatcatcactgctttcggcgtcggtgtcgttagacggagcccaccagccgagagcgatcatcccggcacgcatacaccaatagtcgtcatccacacgacgacgcacagaccgaagccgctcgaagatatctagtacacactcctcatcgttcagtttgtacaccatgggccagtcgagaggagtctggtatatcgaagcgtcatactctggtccagaaagaggctttgcccactctgcagaaggaggaatcggaacctcttctccactcgccgacttcttcggccttttcgacggcttgcctgccgccacgggagtcgcaggagccgcacgtttcttcacggattcccgaggcgtctcgggaaggtgctcttcgccgtcgtcaggatgagcatcgctattatcgctatcgccagaaggagcaacagctcgctccttgcccttgcgacaaatctggtcttcggcaccaccctcttgtatctggacgcttaatagctctgctggatctggcgtagcctctgctggatctgacgtagcctctgctggatctggcgtagcctctgctggatctagcgtaacgataaagctgaggttcccacttgtcgttaattgctggcagtacacaggttgaccgttcgggtttattgatgagtcttcttcccgcttgattcttggccttccgctggcagcggcagcgatagagacgtgataaacctgcctgcgatgtttttgcatcgtttttacgctgcgacacgtaaattgacagttttcgacttgacagcagttaccacggtagaccggtaatccggggatcggccgggagtcaggggatggcgggacaaaaggattggtattgaagttccttccaaccttgactgcttcagcacaaattgccgtccgctgtgccaatgtacgggcagaagggtgttgtcggtgcttattggctagatggccgacaatggttttagcatccacggcagattcacaggtcttgcagattcagaactgataagtggggttataggtaaagaattccccaattaagttcatggtgatagtgcgactgtacgagtgaagaaaggagtaatattagactgaagaatagtaagatgcggttatctcgcgacacaacgcgacgcggataggtgaatacagaatatctatagactatagtagtaggtgaatactatctttattagctagtaaggcttagaagttagctctggtattattagccaagaaacgtacagaatacctgttgaaatgaccgaaccgtttgttacgagccaattcgattcagaagaaaagaaggtacaaggacatagtcgttccttcctcgtttggcaagtacaaagacgtgaccgttcctgcctcgtttggtaagtacgatccttcccagatcgtcacaccgttaacgactgagtgaactgggcatcgggccgaggatctacatgcgggattagggtgcatttgcaaaaggaatccatagtagtagggggaattgtaactagaatggcctcacgattgagagtctggagtatgggatatgtcctggctcagtatccggggccgaagaagagacaaaaagtgccttcaaagttatgttggggaaaataactgactattcagattgtggtgtatcccgtatcttagaatctaatatatggctgtggatccagactagggattgacctcatgtcatggagatggatgttctatccattaacactataaatccctgttactatcagccagttaaggacagtgaaatggtaaacatgctagtaagttgcctgttttgtttccttccttatccgaacttacagtagagtcgaacaccagggcagagaacgcgtctcattgctagcagaatatcacctcgtataggctagccaataggaaaaagttatttatagaggtaagcaagctgcttccgaaaaatccatgatcagcacaatgttctttattgatacatttccttgcaagttcctgctgggaatagtagaatcccctagcaggaatacccagaaacagtactccgtacctcaagatacaaccttcatatttcttcgattcatggatattctcaacacaaatatagttcgcctgaggtcagcactatatggatacaatccagcaagtcatggagatccactgagatgctctgagtggctggtggtgtcgcaatatcaaagttcccggagtaggtcctccgtactccgtagagccctggtcttggtcgagggccgacatcgcaagttgtcgggttgttctcatattggctcaacggcatagagtagtggtctaagatagttcgattggaaggtcgcaacggtatcagatagggcgtggaggattgcgataaagcgctttggcgacttgggcttggcaagtaagcgtgcgccactgggagagcacgcaactcaaccctgtcgagtggccatccagacgatataaatgtctagacgatcaactcgagcaaccgcataggatctttcgagactgagtttaacagaatttataaagtcattcgggacgccggcgattttgacgtgatataatcctgtgccggtgtcgggattgccaataggttgggtcttagtggaactctctcttaaggcgttggtcgcttggcgaacggctagaatcccccagggattgggaaataatgccgaatggtcgtgataagccctcctgttggtggatatgaagctcatctttgtccgcaagcgaagtcggagcccaaagagcatgtgctataactcttggtgttttcttggtgttatattatgagcgatgtcccagttgtggtctttgactctctctctctctcttttctcttttccttcctttccctccaaaaaaatgtccatatgatgagatgacctctattcctccaaggaagaccacacatgcgaatgaccaacactaactgaaatcttcccccttatctgctgaggtcttggcaagtcaccgggcacaaaccacagatccaccatcgttcaatgtttctacgcaactcttacgagagaataattaccccggaaaacagagaccagaccagaccagaccgaatgataggaacggcgggttctggtttctctcatcgcttggaatgtattcaacggcattggctattgctgtcttgacggggaaacgcatgccggggtaagcgggtatgaagctttgagacatacgaaactccacgggaagggggaaaagggccccaacgttacattggcaatcatctggtgattgtgattaatgcgatttattgatctcgcaatcaggaaatccgcgctcgacatcgcatatcccgaaagcggatgtgttttccggtcctgagtcgaaggcgctcaagccttgccaatatgcagcccatgcagcccatgcagttcaatattagcagtcgccatcggatttccaaatatatccttactgatttgtcgatttgatggcattgggaaggcgaaaacaaatcccagaatttgccctcgtggcaaatcccggaaccgtcctcaactgggaaattttcaacctcatcggcaatctccgactgcacatctcaacgtgattcgatgaaaaaaatacacaaagtggactcggcctcaccccttctagaaatccccaggatgccaaatgcaagaccagaccattcgctgctctgattgatccggacctgtatcaagagtccaccctatgctcggcctttaattgcttgactcgttcgtttccgtgtgcactgtctctgccgtgtggttacattcgcatgctcgtgggtcgacttgctcgagttcagccattcgccgtgggacgataaacatgccgatcgcatccacggtcgaactgcgaacaatggcccgtatgcgaccttctcggatgagccttagtggcatgggggcatgggggatggcgtgcaatttgctttttttcttctttttcctgcttttctcaagataagactctcctccggtcccacttggcctcatttgtcgagtgcacgaaaatttgcatatatagtattaatcacgccctttttttgtgcctctttctctactcccgattgtgattttttttctaggccctcttgaaagagaaggcatcatctggtctcgtagccatgtcgtccacagaccgtgagatggagacttctgcgtatgtatctgtgtggctggcaatttcatgaagggcaactaaccctctcttcagagctccaccctatgacaccgaagaggtcactcaccatgtcgtcctgaatgaaaaggctatggatgccgagttcgacaaggagaaccagactaccccggatggcggcgaacccacactctcggagaagatttccttgcgccatgtcgcagagaacctgcctctctccgcctggttggtggccgtcgtcgagctgtgcgagcgtttcacctactacggcatgtctggtctgttccagaactacgttcagcggcctcgggatggtagcgagggacgtggtgcgctcggtatggctcaccagggtgcaaccggtctcactaccttcttccagttctggtgttatgttaccccgatcgtcggtgccatcattgccgatcagtatcttggcaagtacaagaccattgtgctgttctgttttgtctacatgattggcctgctcatcctggtctgcacctccattcccactgccctggaccacggctcaggcatcggcggtttcattgtcgccatcttgatcattggtctgggtaccggtggcatcaagagtaatgtggctcctttgattgcggatcagtacaagcgcaagaagatggctatcaccaccaccaagaagggtgagcgcgtcgtcattgaccccgccctgacaattcagcgtatctacatgatcttctacggatgcatcaacctcggttcgctgtccctgctcgctactccctacatggagttgtacatcgacttctggccagcctatcttctctgtctctgtatgttcatggtcggtaccctggtgatcattctcggccgcaagttctacgtcgttcgcccaccccagggctccatcatcacggatgctttccgtgccgtctggatgatgatgaagaaccgcaacatggatgcccccaagccctcctggcagaccgaacacaatggtgcgtcctctgtccactgggacgaccacttcatcgacgagctgaagcgcgccttggtcgcctgccgcgtgttcgccttctacccgatctactgggtcgtctacggacaattctccggcaacttcgtcacccaagccggtcaaatggatggccacggcattcccaacgatctgatgcagaacttcgaccccatctccatcatcgttttcattcccattctcgaaacctgcgtctaccccctgatgcgccgtttgaagatccccttccgcccgatcacccgtatcgcccttggcttcgtcgtcgcctcgcttgctatgatgtacgccgctatcgtgcagcacctgatctacgacgccggtccatgctacggcaaacctttgtgcgcggcctccgaggtcaacggagaagcccaaggcaaccgagttcacatcgccatccaaaccccggcctacgtcttcatcggtctgtctgagattttcgcctctgtctccggtctcgagtacgcatacaccaaagcaccgcccagcatgaagtccttcgtgcagtccatgtacctcctcacgaacgcgttcggctccgctctcgccgaagcactcactcccgccgcctacgatcccgccgtcatgtggatgttcaccggtcttgcctgtgcatcctgcatatgcggtatcatcttcttcgccgtgttccaccacctgaatgcgcaggaagacgacatgaacgccctcgatgctgaagaagagatgcccgaggctccggttgaggcggcacggggccagtccaaggccgagtaggcattggcagtgtattttttgtgatatatttgtatttttcttgtttctttggcattggcattggcagcattgcaagtgtctcttatctcttacgctgggatcgtactttttttttcattgcttgcatcatcggagcgggaccctctgtgtgttctaaaactgctgtgcagattgtgagacgtggtatgatatgatgcattaatttagtatatacttattaagaatgaaaataatcagtatacttatcaattcactccatcttcaccgtacttccaaactccatgttcgtgggacagacctccacaatgacgaatatgacagacacactacggagtacagactactccgtatagaagtggattcgactccatctctgtgatgatcttctccgctcctttctgcgacacgccgtttcaattatctttcaagggtctgctcgcactgttaaagtgatttgggtaagagcttatccaaaccacccaaatcggaagtcaaagctcatgccagagcggtttctctttagtttggatatgtgatgtttctcagtcaaaacaagacatcagatttgcaaggctggagtgaccctcgactttcattgctctcaaatcttgagcatttggacatactcacttttcggaacgtcttttttgaagttgatctaagcctcatatgcccacctttgcacaacgccagatgacaatggcctcgcattcctatcccttggccattggccgaattccgtggcttctcctaaaatgcaaagcattctagagcattcaagctcttccatatcgacggcagagatggttcagctttgaaacgaaggactaaagctgttagtaccaagctatatgacagaacattgagcctctttttcatgcttctcttagcctcccaacgtctggcctccagttcagattccaggaattattgtggtgtccccatcctgtatgtgtatcgaatccaccagatcgagacaatatgctagtttgtggcattgaagggattttaaacatccacaaggtaaccttggaatggaatggcttagacagatgtctaccgaggtagatccacatatgagacccacactccctgacttcagaggctcaactgcctcgggagcacagccctggcggtcaactgcctgaatacaacaaccattaggtgaactctgtggctaagaatacccgaggcttacatgccgcagatgcatgaggggcgagacctgggaatcgttcgattatcatggcagatatgtcgggtgacacctaagaaggatgatacggttattgtttgagtatagacaagattcaaaacactaacggttagtccggggtgaagaaagtgagtgttggggatgaaaaggggacggagagttcttaggccgaaagaagaatagaccgggttaccgcattgggcaacctcatagccactcctccgtacgatagcccttatacggagtaaccatatgctgtatagatcaggcagctatactttgactttgctaaatgagatttagttgatgcctgacatgaggctgatcgaaccttctaaatgccctgattggccaagtttcacatcgatttttcagttcgtcttgtccctacgcatgctatttccgacttgtcgcccagactggattgttttcctattggaatagtccgcgttgcatacatatgtctttcatcaaggcggtacatcataatcatgacgtgcagactcccttgccacagaccgtcggacatgtaccaggtacatcatccagggtggatattacaaccaacgccaagtatccagtacttgatgaaaaaatatgccgctctcccccttcatcgaatcacacggatctgccatgtcttaaatagaacaggctcagccacacaggatgaaaggccaatctcggggactccaccgccaaattgcaaggaggctgtatccgtactaacgtaggaacggtgcactgtccactctgtagcagacggttaaaaatagggggaccccaaagaaaccactgtaaatgcgaagacctatgaaacccttgaaaccgtcgaaccccgttaaacccattgatcccttttaattcaccccaaattaatgcttaattctgctattcagcgcgactaacccccggatcttattggctttgctgcgctgacaccgccagcccttctgccgtaatttccacttctccccgtctcacccttccctcctacatctcccccctccccctactattattgttttgttccccagatctgagaacctgagaatctgcacatcatgagtgtgagtgaaccaatgtgtaccccattgattgcttgagtttgctttctgacgcgacttcccctagtaccagagcttaggggacacctcaggcggctatggccagtacaacccatacggaagtcagcaacagaccaatccctatgggggccaggaacaacaaagctatggatatggtggtggttatgaccaggctggcgccgcggaacagggaaatggtggctacggtatgctgacccgataatcgacctcttcgcgacgagtctaattcctcaacagagatgtccaacatcaatcaagcctcatctggtggcccaacggcgattctgaacaagtgcaaggaactgaacgagggtattaccgagttgaccaagaagcgcgagtcccaattggtcgccgcccaaaaggcccttctggactcaagcaccggcaaggaagaccaggcttcgcgccaaacgctcgattacattgaggatgagatcaatacagcgttgcgatacctgcgcgatcaattcaagcgcatcaaggagaccccgggatccggcgatgcgcgcgtacagggccaggttgagaacgtcagccgcaacttgcgtcgggagattgagcagtaccagcgcacgcagagcgacttccagaagcgcctggaggagcaagtgcgccgccgatacgagattgccaatcccgaggctacccccgaggagttagaacagggtgtgcagaatgttctgctgggacaggagcagagttttgttgtatgtttcgcccgaattgaatcttttacgggtcgggtcggttgctaatatttgaggaataggttcccggtactcgcacccgccaggccaacgatgcccgtcaggctactatgcagcgctccgccgctatccgaaaaatcgagcaggatctgatcgaactcagccacctgtacaatgaggtcgcagagctggtacaccagcaggagcctgcagtccagcagattcagcaaggagccgaggagacacaccgcaatgtcgagcaggccaacaccaagcttgacagcgctattcagagcgcaaagaacgctcggcgctggaagtggtacgcgctgatcatcatccgtaagtattacctgtcaagaccaagatctgatcgacccgctaacctactttccagtcattattattggtatcgtcgtcggtgtggccgtcggtgtcaccgaaaacaacaagagcaagtagcgggaaatagtgatttgtctgctgcactgcatcattttcctaccttgtccatgtacgacctgtcccgggatcttctccgcatcttcccatttgtctttgttctctcgttataccaccccttcgcatttccttcttgtgtaaaagcaatgtctttcaacccctctttctttgtgtctttgcctcctagctgtctgtacctgcgtgttcgtgtacagctgctccgcgtctaacacgcgatggcccttgatgattgtcgttatttcggggctcgtgatgttgcggcgcatggatgtatatactagattgttgctttcctccgccccctgtttggcgctagaacctatgtaatactgtctaataattgattccttcgcgcatgagtttgatctatcacgccgtagatataaccccgtagttgaaaagtcctggaatcctgggtttgtgcagtgtaatgtaatgcattccgagtcatcgtttgggggtatccgactcgacacgctctttcgaaataacgagcacctgaacgcccaatcattccgcgatctacgccttttccttcctctccttttcgcgctgctcctcagcgggtgtcttcgtcttcaactgcagtgcatgtagtccgccctcgcgagccatctcttccttgaacaacgaatagaccatacggtgccgagcgggctgcatcttcgactcgaaggaatcagagacaattgtcacactgagagatattagacattgactcatacgccgtgtatggtcggatgtggggaacgaacttgaaatgcgtctctttcgataccgacccttccattgcagcgtggtgcgcatggaggtgagagtcattccggatcacgagtttcgaaggtgtgaatgcatgggtgatctataaaaagggggggagaagttagcaatcgcagtcaacaacagtcaacaacacggaggagtggctcaccttatcgcgcatgacatcctctagcggcgtattggaggccatccttgcagatacagcgaagagacggcgagggagcagacccggaaggctgcgaggaagcatttagaggaaaagaagaagtgatcaaagggaggaggatgagagagatgtccgcaattgaagccaatcaaatgttttcgatttcggaacgtcactgtcatgacatcagcttgtctttttgctcgagacatctcaattgcttcttcttattcaatgggtttctactattaaagttcaaaatttcaaatttcaaaatgtctggtttactttccctgctttcgcgtacgaatgcgcgcgtctgcttcaccccgcggcgaatgcctctcagcgccagactcttgtcgactcttcccaacacacatatcttccgcgcactccagagccatgacccagaaagcctggccgtcgtgcatagcatctctgcccgatcattcacctacggtaatctaattgccgacaccgttctcgctaaggaggacctggaacaaaaggcccagggccaattggctggcgagcggatcgccttcatcgcggagagcagctatgattacgtcggtacttgctgccttgaatcccgttgaagaatatacgtagaatcctaataagcttacagtgatgatgctggcgatctttgctagtgatgccattgcgctcccgctctcgccggctttcccggttgcggagctgaagtatatcttggacaattcacaggctaagatgctgttgacaactcaaaaatatgccaataaaggcctggaagttgtggacaagggattggagcacgaccctgtgttctctatccgccgtaagctcacagagggcgcctcgagcagcgaagctgtaaccctacaagatttgaagcagccttcgtccggtgggttgatgttgtatacatctgggacaacgaaccgaccggtaagctcagttagttcctgcgcccaatgagctagctaactcggaacagaaaggtgtactcatcccccactcggcagtggccgcgcaggcatcttcactattagaagcatggaagtacacgtcggatgaccggctgcttcacttgcttcccctccaccacatccacggcgtggtaaacgcaatcgtggcgccaatagtagcaggctcctcggtcgagttcatgcaccccttcaatgcggaaaaagtctggaaacgactagcagcacccttcctcccatccaacagctcaagatcacccgtcacattcttaactgccgtcccaacaatctacacccgcctcatggccaccttcccggaactaaccccagagtaccaaaaagccgccaaagaaggaatctccccacaaaaccttcgcttgagtatctccggctcggccgccctaccaacaccgactaaagccgcctggacaaaactcagcaacggcaatgttctcctcgaacgattcggcatgaccgaaatcgggatggcgattagctgcggcctcgacgtcgcagaccgggtcgacggcagcgtcggctggccgctcccaggcgtcgaagcccgactcaccgacctcgaaacgggtgctgtcattccagtggaagacaagaattccaatggcccagaacgccaaggcgagatccagatccgcggtgaaacagtcttcgaccattactgggacaacgagaaagccacgcgcgagagtttcgttcagagcgatgatggaggccgaccgtggttctgcaccggcgatgtcgcgatccgtcgagttgttgacggagctggtagtggagcgagcggagattgggctcggggaccgatgtatttcatccaggggcggaagagtgttgatatcatcaagactgggggtgagaaggttagcgcgttggaggttgagagggagttgctttctctgtatgttgtcacattcctttcaggtgttcacttgaaagatctgtactaacgatggtgcttagtccccaaatcaccgaagctgcagttgttggtctcccatctgaacagtggggccagaagattgttgcggtggttgttctttctcccgacgcagctacttcgggtcataatggtcaaccctggggcccgctggatatgcggcgcgcgttgaaggattctcttgctcctttcaaaatcccgcatgagatgaaggttttggaagctattccgaggaatgcgatgggtaaggtcaataagaaggcactggtgaaagaggtgtttggtgcatgaaagtcgaacacactgtacaaattgagagcctacctaaacatatgtttgaggtaggtgatgtatatctacccggagaaaggatgtacaacgatctgcataatagaacattgaagatttaaatcatttgttatattggaaataaccgaaatcgcttgctcttaatcccaaattcatatcatcatatcaaggcctgtgcccggcaagataaaaaaccaaagagttccaaatatccacctagattctacggtgatcctcattctcaatgcgagtagcgctcgaatccacacgaggatcgagcttgttggcaatgctcgagctgtgaggaccagtggtaccagtggtagttccagtgctagaagtattgtagctactgccagcaacagcatcctgatgaccagtagtaccaagacccgatccaccaatcaccgagccaccgggagcggtagtatcgcgagtgtgggagccgtgggtaacagtaccaggcccagtaccagcaagaggagactggtgctgagggtagctgtcacggtccgagtcaacgcgggggtcgagcttattcgcaatgttggaactgtggggtccagcatttgtgctgctagtgccaggggtaggaatcggaccactgtgggtagcgccagttccagagcccagggtagagccgtgggtgcctgtagcggtgctggggtgagtagacccaagaccagcaccagtgccggtcaaaccagtgccatggatagtgtcagtacccagggcagagccatgtgtgccggtagcggtggtagggtgggtagacccaagaccggcaccggtgctatgggtagtgccagatcccagggcagagccgtgagtgccagaagcagtggtagggtgagtagatccaagaccggcgccggttccagtcacaccagaagtgccatgggtagtgccagatcccagggcagagccgtgagtgccagtagcggtggtagggtgagtagatccaagaccagtgccggtgaggccctcgtggcgagcacggttatcacggtcagagtcgacccggggatcggccttgttcgcgatgtttgagctatgagggccggcattggtgctgcctgtggtattgtgggtagatccaagaccagcacctgtgccagtcacatcggaggtgtcgtatgtagtaccagagccgtgggtgccagtagcagtggtagggtgactagacccaagaccggcaccggtgccagtcacaccagaggtgccatgggtggtgccagagcccagggtcgagccgtgagtgcctgttgcggtggtgccgtgggttgtgtcatgggttgttccaagaccagcgccagtcacatcggtatgggcagcacggttgtctgaggtagttattagtattgaattctgaaggatgagatgtcaggtgaggtgaatgacaaacctctatcactgtcgacgcgggggtcaagcttgttggccaagttggacgagtgaggtccatggttggaggactttgtcgactcgtgggactcgttcttcttgccagtaatggcctcttcagccttgcgtacaaactgcattttggtagtgatggtatttatgaaagttgaagttgattgaagttggttgaaggtgttatcaagtagatattaaatatggttgatgaaggtaagatatgaattgatctcattaggagaagaagagggtatttatatctcctttgtacatagacatactcaggcaaccattagagtaatgatttatgacgttcgtggtttcaatgtgatggtgtacaagcatcacgaatttaggtgcgacgatccacgatcctctatcggatacgatgtacatggatggatttcttatggagttcttattagctacatggtcagccacttaactcagtgtactgtcataagaatgttaaactggctatcatccttgatctaaacgccaaatatcaaaatccaaaacaattgcgtcatggttcaggctttgccaagaaatatgtatgccaactatatgcacctgggcagtacatatatgtacatacaattgtactcagcacatcctagtaatcctatagccaaccagaataaactggaatgatatcactgtggctaaagcatgtatttatcttgttcttatgtacaccgtagtctcatctttgttgtacgaccttgtactccggacttgtgatagggcgtggaagtcgaagcaaagaagacttgtaactttatttattcattattgaagtttgtagctagtggctcaattgacagatatgaaacatattcacaccgtactttctgtcaaagaatagtcgcagtggtgtagtcgcgtggctacgtcatcggaatttatgctaactagccacttcgggtatatctccgactagccgcaattctcaagagcttacttactgtcacctgatctatcactaactacaaaccaatttcaattaacgagaatggtagaatttcagtactcttttgactgtctttgtagatgttgtttcctcaatttaacaaaaaaagttagggaaaaacgacagatcaatagggtggaagattgaaattgcgaccagcggtggatatacccgaagtggctagttagcatagtccccggtcacatgactgggatatatggtctcttcatcagacaagtggcaataaccatgatattctgagaaaacgtccacgcgtccttcgtctgggatagtcgttcgacatggaatatgtgacacatgtctccttaatatcttaataccttaattcaggacctgcaaagacccaatcccgaagcccaacttagtgagattgaggaagcctacgacttggttattcggaccggtagtataaagctacactgatgagtgattcagtgggacctttttgagggtcagtcaagaagacctctagtcgttgatggcaaggttgcccaggtgctagacctcgctcttccaaggcccctgaaacaatcagttgagcgagataatcagggctgcagctctagtcattgcagtgcaaagtcaagatttatgggccttgctaggtgagatcacctctcaacgtagcatcgctgagaatatatcgacctagaatatttccaagcttcgccattcaacgattgcttaaatccctctagctgacgcattggtagaaccattgagaaaaattaccgaacaaatttccacagcttctggatgtacagtcgttgaaaacgcaagattacttcctgttcaatcgaaaatgaggttgaaaaaagctccgaatctgctgatgtcagcatccggtcgctccggtccgggtggacactccgagatataagctgttcgccatggagttacatacatggacagtctgaattcggtaattcggatctgtggggttgcatttctacgcccttggggatttgtactgccaggcgtagatccggcgttcccccccttgcttgcgatccttgaattttcacatgcgcgacaatttacatcgaaattgttcaaaggagtgtcccttgcaaacaatcataatacaagctcttcccagacaacacagtctttccgcctgaagatcccaccccacgggtcgcgtaacaagccatgtggattgtctcgttctggatattccccttggtatccgggtgcatgtggattggtgagagtcagaacacgagggaataagcttacctgaactaatggccttgtagctatgctggtagccatgttgtcaacctgggcggcggatggaaagccaatttattccaccatgaccgatgggctcaaaattccgtgagtctaatcaatgaaccttggccctcggcgcaacatcgaagttaattcaacaatcagttacatttcccatattggggctgagagactcaaaccgctgttcattgcgggaagtgcagtaacagtcgtattcatggatctcggtctcatctctgagcgttggcttcgtcatgccggccaacttgcccgaaacaaagggaggtttgacaagatctgtgctgttggatcgattcttttctcgatcgctggggctgtaggtctcattctgctgtccatattcgacaccaagcatcactcaaaccttcacgacgggtttttagctatgttcatagcatgctacgtggtctgcgccctcctggtatgtatggaatacatccaaatcggccgattctaccatccgcaagcccggattttgttagtgagctttttcatcaaagctcttttcatcatctgtgaagttgctgtcgctattggatttggcgtatgcaaaagagccggaagaaacaggaacgcagctgctgttttagaatggggtaagttttcagccctgtcagattgtgcaaggaaaagctaacttcagtagttgccgctcttatattcgcattctttgttttttctttcatcattgatctcctgccgtccgttcgtaccaagagacacgttccccagggtgaaaagtatactcggccggatgtggagaatcgaccagttgacttttaagtcgcgagtacagtctgacagcatataataattattccatagatactcgtggatgtcagaatggcttttgccaatgagagaccagttttgactttggccacatgtggtgatatcatccctggggaaagggtgaaaaccccgaatctctcgaaaaggaactctgaacacttcacactaattcaagcaatcaataaattaatacctgatcatcaacatgggcttcttcaaccacctctgtggtttaatctcaaccatcgctcatatcatccaatgcatcagttcatttgtcgtcctcgggatcacagcctgggcagcccgcgagacgaaaacccttacggtgatatttcccttggtggtggtatatttccccaaggtcttatcttaatatgtagagattctaaaatccttccaggcggtcctcaccccaatcctcgacggtataacactaggcatcagctgctttacccgacgtcgcagatggcaggttctccctctgcttctgacggacgcagcactttcttacctgtaagcatgatagtattaagcactcttttataccggtaacaaatgctctcccatttagctggctcactgcatttatctttctggctcaggatttcaaccaggtcagctgcagcatccacctttggaaccacgagatggtatgtagccggaagtatgcggccgaggcattcagtttcattgcattgtaagtgacgttcttttgacgatcaatccactcgctgatcgcacggcagctttactacattcggagctatgacatccgaggttttgtatgcatacctgccgaagaaagataccccaattcaggaaaggaaagatggggcgacgaacctggagcataatctccagggtgccggattaatgaacccttgaacagaaagtacctgtgaatgctgaataacgatgtccaaggcatgaaatccttcaattatataaagattggcgatgcctataggagatgtatatgatacagtattgtacaagtcacccaaactcaagcccactcacccttcctctcgaacggcttcacaaaactagtcgcctccatagtcacctgtagagaggccatatcgacagccgtgatatgagcttcgaccgtgcagaagatatccagcttatctttatctgggaaatccggagggatggtgacggagcagttcacgccaagactggtgatgacgccggaatactcctcgtccaaatgtctaggcctggtacgcggggtgcgtagcagacatgggaatgtgacggggagattgcactcggagaagtagaatgcacggaagaggagcatgcaagcccaatgttgtgcggagtatttgtcgaggtttctgagacgtgtgcgcaggggttgagagtagataaggtgagcgtcgatgtcagatttggagaaggggaggagagagatgggaatggtgtttgtgtcattggtggtgatttcagtaggagtctctgctagatcggcttttgctagatcggtctctgctgggtccgtctctgctaggtccgtctccactagatcgatctctgtagaatctggactatcaacaagagcgtcaaactgacggccgtgttcatgctcgaaacgcaatgctgcctcgatctggtaatgcgcaataacatccgtgtaccggcgcagcggactggtgctcttgacgtacgtatccaagcccagggtgtgatgcttagttgggactgtagaggagtaggccaacggtacgctgagctcatagaaaccctcaccgccgaaattggacaagtttttgttggtcacgcgtccgtactccgggtcgtaccacgtgccgtcgtagacaacggggatgttgcgtgcggcacagaattcaccggagatgtgcccggccaggttcatgatcagggagactagattgtcccgggattggtcgcgaacgtcgtatggatcataggattgcacatcgagccggatgactgggtcaccgagatagtggcgtccggttgtggattgtaaatcgtatggcggcatcggggcgtcgcctgactggactgagatagaaagatctgggctaagaggagtgaggtccatggcaccattctttcgacgggtctggcggaatgcgagcatgagttgacgcatgatgtggaatctatctttgtcctcgggccgcaggccttgttggatagttttaccctcaggtattgatggttcggtgaacttgccaccgatggtgaatgattccgactgttcttcagaatcggggtcgaagaagtcgcgcagtgttttgtgagtgatgttgatgacattgtgaattgtgccgtttttgatttcactatccaagatctctcctcgaagattcatcttcgcactgaatgtgagtaccggccgaccagctgccaaactgaagtggggttcagtgagagctttgggaagcatgggataggtgcgttccgggatgtaggtggtgaagagtcgagaagctgcatactgaatgatagggttgtcatttttaataaaggctgtcggattggcaacgtggacatgcacccagaaagtgttacgagatcctggcacgggctccagcgatataccgtcatcaatttcctgcgccgtcacatcatccacacagtaaactaggagatctccccaatcctttctcagatgttgcatggaatcctgcaactggtcggcagtgagcttgctgcaagattcctcaatctcttcccactccatgtcccttgcgagggatatcccatgtccaggaagcatcagatactggtcaaggggtaaaaggttctcccaaggcgctatgatgccgatctcctgcaataaaagacgggttgaagcctcactcagaccaagagtattatacatcccggtggcacgcatgatatgtgttgctgttgatctcagagtgcccgatggcatgacaatggaagggaccgagtacagctgcagatattcaatgatcatttggtcatctgcagtaaatttctcggtaggaagttctcggaacactagcgggtttccatcctgaccaggcgaatacctgttggaggatggtcccacgctggacataatagtcggagagcggagccttctgctaaggcgaatcaaccgctgtgctttagtgatgaaccggttcatagggtggtctttagatccctgcgtgtctttgcgcattgtggcacgaacacaatgttcttggtgttcatgagtccagtcaacgacctgtttgacaatattggcgatccgttttggctgcacgatatacatccggctgaacaaggagctgccatctttttcgatgagaaaaggatgccggcgaacagcttgatggacagcaaacatgttgacactagtcagctccgattcctcaatgccaagagcagttgttgtcaaattttcaaggctcaagcatagaacttcggtatcgtctgccaccttatcatgaagatcatccagtatctgggaattttctctatagaatttcaaaacatgagtcttgaagttgctcatcatcctcagaagaggagcgcccagtggccttggaagacctccctcgggggtcagttgaatatcttgacatgcgatagcctcgttatccgggaaccatggcgtgaggggctcgacaagttcggtaggtgcaaatcctttgataacatagtcgagctccgtgttggagcaaatgcgccaattcccgttgccattgtagaactgtttctgtttgtgaacagaccgcacgtagattccgtaattgaacaccccgtccgcgttcaaccgggcgattaaatcgccctgttcgaggtgttcaccttcaaattcatctttgtccatagcctcttggttaaacctgttcgggtcaccccaagcatcgattatgtctcggccgttaggcattgtgccaatcgatttaccaggtatttccaatggccgattcttggagtcggatcggcgcaccgggtccaaatcattggggttgctatcctgccatttcttcaggtactctcgaatgtctccatgtaattcgaattgggaccgaaggaggatattgccatcgataggaactcttgggggcggctcgtctggatcagctgttttctgctgggatagaagaaagattagcggtgaatagcaaaatcttctttagtatgacacacttcactactggttggaacagcctcagctgaccccaatgttctcgtggtggacgaaaagcgtcgccccccagacaacaccggaagatgagtggcggatgcgatcgacgcacattctacgcggttgtgtcgccatgtgcagagcacaggtgacaaatttgcaccagtcagcttctgcaaagcccttattcttgtaagtgccattgccagagcttgcgcataatgaatgcgccggtggctcgaaaactaagtatattatgccggcagttgctataccgccataggcggtatagaaattgtcccgtgattttggtcgaccaatcacattgcaacatagaagtatagaattctgtttataccaaagaagctcactggatgaatagtctcatagttagattatttagattgagttgtagctagtaagaacacatcgatatcaatcgatggcacgcattctctctaggccataaaatacaaactataatctcacagataggccatcgcatagacagtagctcccgaggacatctaatgagtacccttccttgtgtcttaaagtctgtggtagacattctgcccggttccaattcttgtcacaatgcaataatccacaaaaacaatgccaactagtagaatgctgtgggtatacctagtacatcttcaaaccactggtcatttcccaaatccattgactgcatccaggccatctgatctagatctggaatatggtgattgcgactagtcatgtcagagtcagcactttggcatggcctggtccccacatcttgtagctgagaagccatggtccatcgagcttcagcccacagccgacatttggtcaaaagcttaaataagagcttgagaaaatgatcattgcactgaagttccggctctttgctacttagatcgagcttatggagcatacagtccatcgttgatatcaggtcgactgtattccgcaccgcttggcaatcccattgtgggtcttcaagtgttgatagatatttcaaaagtgtgatactcagaatcatctgtgaccaaaagtgaaagggctggccgaaaattttcgagcaaggaattctgtagaactcgtccaaccacgatttgatattctcgaccgactgccacaaacactcgagtcgttggaattccagtaccaccccgccgtcactaattcgtccagattgatctaaagcaagcgagtcttgacttatcgaataacctagttgatttatgtataattcgacgtattgagcgtgtgtattgaggatgtctgcgggctaagcctgggtttccccaggcgaaggtatcagcaaccacaggggagacaatctgctaggttattcacgcgggaaaccacttacctatatggtagagatctgggggaaatgaagatttaagtcatgcagctgtgttcgtaaagtcttgagatagaagaaacgaggagctgaggccgctgcaggagctgttcctgtacgagtaccacctatctcgtcctgttgtcgaacataatccgctttttgctttaacagctgcaagtgtacttgaaagacaaataattcatccgcagggcatgacttggttagtgtgatgacccgaagcgcctcttccatctgaggcgtccatcgtatagcgtcttgacgaccgagatgtgacgaaacactaggattagtcatagtttgttagtatgtgttgaccgtaagaggatcacaatgattatgcgcacttggagctcaaaataaaacacgctagtaatgccctctgtctttccaaaaagccgtcaggcaattgatcgttagggctgtgaggttcttcagcctgcccttgggtaagagacataatggctttcacgtctggagaggatggtttgaacaaccgcaaatcatatactattgaaatggcgagcatcattaggcgagagacaagatccgctctgccaagaaaggcgtcggtactccatgctaggtaagtcagtaatccaaggagcaagtcgatattagactggacttcgcgcaaagcagacgtgaataggatacgcttcagctcctcaatttgacccagtctttcttgcgtcgagaatatggtaacagtgtggatggcttgaagtaagaaaggcctgttttggcgcagatacgagtttgtcatgtctggggtaaaatcgatgaaaggaaaacatggcagcattcgggaccggaagaaatcgagacgctcatcttcttgggtcagattcggtggtgttgtgacgatcgagtccgtcgcaaacgtcggcccctcactgatattcagcccagcgctggtgtttaccaaggttccattcgaatgagacgtggatgatgaaataatgtttccgtcgagggagagagctggttgaagtggctcaggtacattggcggaagtccccgaagccccctgggaaacaaatgactgcattgcagataataatatctccatcttgtcttccagccgagcgatgcgcgaatcagacgatccggctgcctgagcattgcgtctgcgaaccgactctgatggctgacaccttttcttgagacggagacatctgagagaatcattagctgaatatcatctgattaacaggccggtagtcattgtgacctttcacacttatcgccgtttggggtacgcacacatcggctctttgccttatagcaatgcgtgcaagcttggccatatgtgctagattgactgagagccaggtttgatctctccatgttgcctggacaagctatgctagaagacaaagtaggtgaacaggattccaagacactttcttgttcaaacggaactccgccggtaactccgtctcaagcggatttggccccgaagtccgcaacccgggcgtaacaaattgttgaatgagtagtataatattagatgttctataagagtatactctcaagttctatccttaatggaggggacatgaaacagctcttgtgagctcacaagagtaccggttataccaaatcgactacggagtgctgcatcggtagaatcgacgtcaagaggcagccttagtagaacaagcattggataaaaaatgctcatttaatattggtgtctcactcgcaagggcttcattaaaaaagaaattcttgttccaccaagccggtcaaccagatttatagatctttagaagcgtctaggtcgttcctcactggtgaaatatcgacagcagagtcgtgccagtaatagattcttctcgtttcggtgtcgcgtaaagattccccgatatatcgacagctgtcggtcaacaagaataagcgtaccatcttcgctaacccctacccttgttcgtgcccaattcgccatccctgtcctttcaaggaggtgatgcgccaagccacgattgtcaatcaactatgcgttgctgacatctatcggagacgcggccgaatattacctatcatattagcaaaaaggcgatattagccccaccgaaagtgcgtctgctcatcaagatcatcatgattattgccaaggagtactctgcacgaagtacagtctttcgattatggttgcaggatcagtcaaactgccatctgattgtaagggatgtgtcattcatatctaaaaatcgtgcatagtcgtgctctcgcctgcatactccgttttccgtatgccattctccacgtaacggcatcagattctacattccagactcatctacggactacccgagaataaacttattcctcctatattgcatgtcatataccaagatctagtggtccccgagactcaagctacgaactatctcattcccggtgaactcctccgaagctgggttgccacttttcaagacatgggatgaggatacaccggtaatttgactcgtgcgttaatccatgctcttgattcagcctatcaaaccgcgttctctgcgcggattcgtacatggatctatagttattgagctatacctccctaccctgctctctcgcccggaagcaccaatgcccgacctctccaacctcgtaaacatgccactttcagcataagcccggcgatcctaatcccccaagatatcgtattatttttcctctgaccgaaaagatcgccaaagatcgcgaattggccgggggaaaacgtattcgttgtcgccaaccccgtccaccttcatatgagtcaaatatgattattaacagagctttcttgtcacgagtatcatttcttgattgtattaagcgagacctgacacaagatcgatcgggattcagcatgccagggccaggggcaatccccgcgagttttggcgggttccacttttggatcttttgtctcgcttgatcttgaggattaatttttgttttctcgattgtgtgaataacgccaaccgattatgtacttttttcaatctgttatggctgattgggtgatgccactactgccgaccagtgaagccccgttcgttgcccaagatggtacggaatacctgtttcgacaaagccaaactctcagggtgatctgccgatcactagggccgagaattggacaattgcttcccacatgcaagtttagccgacgacaaggaatttgccttgggacccactgctgcaggtcctggccctatctggcatctggcataagcatatgtcaagatcgggagatggaggtattcgggtatacgaagagcgtagaaacaattgactcggacgacagagcatccgtacccctgccatgtccttccactccgcagctgcagctgcagcctccaagcacagtggggaactcatcacaacattcaatttatgagctctttcgggtcgataagcaggggcacctgctcaatctagactcgcatggccgactccggtctgaatggaatggaatctctcaacaatgcttctgccgagcattcttctcttggattttgtggcttggtttctgttcctgttgggtccaccattcaagaggggtgtggtcagtggcttcaataatatcctccaattatggatgctcccaagccaaagctatcgagaggttatataaactaaatcccgtggaactgatctagagggtgtatataggttaggttctcggtcgtcatccgttccagtcccctgcttgattaatattcctttcttctatttattcctacaataccatatttgctatattgtctactctcctttgacaacatgctctcaagcaacagatggcacgttttggcgctgttcctagctcttgtccctcggacaatggcagatatctgcgcgacactcaaggccgggggcattgatatcgaagaccgtatctcattggcctacaacaccgacctgaccgagtattggtccgcggcatgcggcgatctcaagccaacatgtattgcagctccatccagtgcagcggagatggcgcaggtaatcaagaacctgaacgacgtggatactctcttgtttgttctctccttgcaccaacagtaaagatgtccgctaaccctaaacagtgccatcaagagcggaggccataatcccaacaatggattttctagtatccaggacggattgctggtttcgactaagaatctagatcaggttgactataaccccacagatcagactgttgttatcggtcctgggctttcatgggaagaagcccagaagggtctcgcgggaactggtcgggctattgttggaggtcgaatgggaggagttggggtcggtggatatatgctcggaggtatgtggatcagaaatcaacaccgactctatctccaatgatttgtaggcggtatgagtttcttgagcacccaatacggctgggctgcgaacaatgtcaaggacttcgaagttgtcctggccaatggcactattgttcacgcaactgaaaccgaaaacccaggtgggtgacactatactccgtatcaacgccgaaacactaacgcttgatagacctcttcaaaagcttgaaaggaggcggcaacaacttcggtgttgttactgcatacaccgtgcagacacatcctcaagaccataaggtctggggtggcaattatgtttacacatccgacaaagccgccgatattctcacagtagtgcgcaacttcaccgacgagtatcccgatgacaaggcggcaataatcctgacattcgagcgtggtctcgtagttgacctgtgtatcttgtttctcttttacgacggccctgagcccccctccggagtcttcgacggcttcactgctattgaacacacctcaaccgccaaaacctgggatacttactacgacctgctcaagaacaacgacttcttcattcttaagtaagacgagcagcttcaatacttggattgttcgctaaatccctactagggggcaacgctataacatcgctaccgagaccacgcctcttcctaataagaccgtgggagcagccccgctccaggagtactatgagcatttccgcgacgttaccgggtccgtactaggagtaaccgggataataggcacagtttccttccagcccatgcccaagacattttcccaaaaggctaaggaccggggtggagtacgaattttattcctaatggaagaacaaggacgatcatatcactgacaaatccctaggacctcctcgatattccctccgatcaaccgtacattatcctggaacttgacttctcctacgggctatccaccgacgacagtaaggtcgacgcagccacggtcgaactctatcagggaatggacaacctggcccagaagaacatcgataacggccttcttcccgacgtgtatcgaccattgtttatgaacgacgcatactaccgccaggattactggggccgtattagccccgagtccaaggcgcttgctctgaagacgaggaaggcgtatgatccccaggaattcttccagaagcggacgagtggaggctggaggctgaaggactagacgtcaagactgtctgggcctaggcatattggatatatttatctcgtctataattgtatttacaaagactaagtcaatcaattggttttaattatgactcaagagaaacgtgttggggagtagatgcatgagctctacatgatatattctggtacggggtatacttcccgtggctcaatactaaaaaccctaccaagcagctccaatcggaaaataaacacagtaaggctagatgcattgccctgaaacttgatctactgtgcattttccatcctagtcaataattagatcaaatgtaggcgcctgcttcagatccggagacgcccagggaacgagtggctgagagcgacccgcggcgagttagggtttcctcccaagcgccagggtggattcgtcaatcggacctatattgtatcttatattataattataattatccttccaatggggtattgtctttagcaaagagctatgggatctcctgctaccttaagctactatccatgccgatcgctatatccggtagagggctcaatgaaagacaagtcacccaattgagtacggcgcttctccaatatgtaacacacaaagacacagcctggcttagagagattctagatctgttgctaatttaatctggtctagacttcggacaattgatgtcattgggagacctttgttgatgtttataaaaagccggaaccagcctgttcttcaatctaacaatcagcttcactttctcttcactttctttcagagtacacttcccttgttcttgagcctttcgtttcatacatatctacctcgtcgttgcttgcttgaatactatcccactcatccgactctcgatacatcggcgaatacacaatcagcccggccaattctccaattccattcattattctaatcagcccattcaaaccaatttcaacccccaagatgtctccccgatacggtgccctcggcgcaactttccaattatcccgcctcttccaagtctgctccctaattgccataatcggcatgacagcaaatttcatcagtgtgatagtaaacaacaatgccacacccccaaatatcctaatcggaacgatcagtgtggtaagtctaacctcgtctacactctaaaccctctctagaaattcactaacaaccaacccacagacctgcatcgcagcaatctactgcataatcaccgcgatcctctacacagacgacatcctcccgttcctagcctgtgccgtgctagacactctgctgctaatcgcactgattgtcgtcactgttatcgtcggcaaaccactctcgtacctgaagtgtacgacgctagcggagctgggagataaggatgctacgttgtatgcatttgcgtcgagactttcgagttacattgctagtgttagtgggaagattgattatgtttcgtggattggggcttcaaaggcgatttgcattgagacgaaggctatttgggggttgagtattggactttggtgagttttgtttcttcttcttcctgagtttctatttattttggccgttgttggagctttgctgactttggattggtgttgtagtattctctttttcttctctgttatttgcaatgtctgtttgtggctacagaagaagaaggctcttgcggtgaagagtatggagtaatgaatggctaggatttggaggcgacgctggaaaatgatatatacggatctatctgtgaggttctgagatgatgacagaaatatagtacgacggaaggaggtaacaataacattcaattttgctggtgctgcgacggtgctgcagcactatataacagtaagtatttcaagctaccaacggaggtactcgtagaattaaatgtggatggcatgtccagtaatgaagtttgtcatattgtatattcggttctctttcttttttctttctttttcgccttcacggaacgagggcgatacaaataatgagggggtgtatcgattccggttgctttcaccaaagtctcctctgggtggagccccaatcattctcccatgatcgccactctaccccgagggctgatagatagacggataaatagccttcttctcgagggaatacatgggaaaccgttctgccaactttgctatatgcctagaagcaaaagtcttgcatctatcccgaactcacaggcggaataacagccacttcgcccccagcctgtataacaacctccctatcttcctcgacatcaacatactccccgttcagactaacaccacaagtagacaggaccttgtgaacaattccagggtatcgctgttccaattcgccaaacaaagcggacagtttcaggggcgcggggagcgattctgtatttttggaggtgtattgggatgctgttgcgaagtagtggattgtgaatgttttcgacatggttgagggagcgaattgactgaaatgacagtgggagaggttatgattgagagtgaaaggtgttgaagaggtcagttggataggcagataagagatggatgaccaatgatctgcccaatgcggggtaactaaatcacactcaatctataagaaccagtcatgcattctatgaagttcatactacatctaaatctccaaatctatctacttcgcaagctcacgaaatgccctcgccaaatcggccttcaaatcctcccaattctccaatccaatgctgatcctcaacaacctccgatcaaccgtcgcatccgtcatggtcctccactcaataagcgtctcaacaccacccagactagtagcatgctggaagaaatgcaatttactcggtaattcacgagcaaagcgcatctccttcataataatagaaaaaacaggcccgaacccattaggcatctgcttcttcaaccaatcgccctcaactttctgtagactggcatggaggacctcaccgagaacagcctgcacagccgcctcgtcgctgtcaggcgcgggattaggcgcatgaagagcagcatcaagccaggaaataagacgggcggcattctcactctgacgctggacgcgtacctccaatgtgcgcagacttcgaacgccaagccacccctccatgctacccatgacagttccgataaagagacggtcggatttgagctgtgcggcccagtcgtcacggttcgtggcgaggacaccgcacaacatatcactgtggccgccgaagtacttggtgcctgagtgcatgacaatatccgcaccgaactggaatggctcttggaggcctggtggggcgaaggtgctgtcgacaataaggtatgcgccacgggcgtgggctttagcggcgtaggaggcaatgtcgaaggcggtaccttgggggttgaccggtgtttcgaggaggattacgtcacctttctcgagttggtcgggttggcagtcgagggggagtttttggagacctgttaggcgggtgaagagggcgatgacgccatggcagccgtggtaaccatcgccgacggagatacggtgggggttgaggagggtgagggcaccgtgcagggctgataggccggagctgtagcttataacttggccgtatagcagggaggacaggattgtttcgaagcgagtagtatttggtgcggacatgcgcgagtagatgtgggaggttggatcaaagtcggactacattggatatgtgttaggcgatgagatatagaacagcgagtcaacgtgcatacaggagtggcatcagcagccggtactagctgggttggatcattggaataccgaaatgtagtagagagatgcataggaggagcaacatcagtaacgaggttcaaggcatcatcagcatgcaaggagcgcgtggaggcgccaatggcttcgctagaatgggacatgataaaagatgctatgtttggttcttgaattgtatgcacagaaaaagggttcgtcaagcaaagttataatacaccgatctcgggggcgggtgggggaagagggggaaatcacgtaatggatcacgtgttggagaaatcacggggagaaagaacaagagaggtgtggaacacatggattatcgacggatggagcccatgcgggatggttctcgcactgatccaggaagagctgccttgaaggttgcgcgtgctatcgaacaaagttagcgaaagaatagtacaagccagagacacaactcaccagcctctgtatcgaacgcaatggcgaggtcgtcgtgttcgatgggatactcaggcatgtcgaggcacacaaagttggaagctgggttatcatccttcttaggcagtgcgaacttggcatctaccatacggattccgaacttgccggaccgggtgaaggactgcatgatatcagtacccttaagaacaaagttcatacaagttccatggtggaagtccccaaagaaagcaagcatttgaatgactttctcttgtcgaacgatctgaattcgtgccagggaagcttcccatttcttgtaaatcggaaccatactccgtcggcgggagatggtgaacgatgtagccatactagtttggtcagcaaaatcccaaccaaagggctagatggaactcacccatcataaagcacctggaagccagtaacagctgcctcgaaagcatgaagatctagaatagaattagcaaaagcagacagaaatgtcagaagtagacataccttgcatggtggggaagtccaaccggcggatcgtaggctttgtcttaatcttctcaaggaagccggttaattgccctggcagttcagggcgaatgaggttatccgcaagggaaagggtcaggtcctgctgccctgagcggaacaagctcatgctcgtcttgctctggacatccaaaccaattttgagttcgccaggtcctagatagaattagcaattcatttcggagcgaggagatagagagagcccacctaggttgatacgatccgtcacagagccccattcagtggcgacgaaggccctcaaatgttccgataggatcgtcggtccataaccatggtcgacgtaagcatgctcctgatcaaggacagatacgcttcccgcggggaactgaaggtatttgaccgcgggctgaccggtgaatggatcttcgggctgctcaatgcaataagactggatggcgaattcgggcgacttgatctctccctcttgtggaagcatgccgagtagcacagagtgcattttcgaacgctcagccgcctcgtggaaagtcatcaacatagatctcgtacggccgtcctcggtcactttgaggagaagagcgggagcaccgtcttctccccgcaagagaccgaacactatcggtgagccgttgccaaaaatatggcgaatgctgctcagagtcttgacctttgggctggtcaggatagctattcggaatccccgatgcgcattgcgagtaccagtgccttctgtcaccgtgacagatcgctcgaacaaacggactcgacatctttctgtagggtctggagggaacgcctttggtgtgccgggatccatatattggaaaattttgatagtattctcaaataccacagtctcacctgcctctgggtggagactgttctctgacttctgggtgtatttgacgatattccaaagagtcttgaaatcgtcttccttgaacaggacatccaactcgaatcctcggggaagcttgactcgcatagaatgggaccggacttgccattccacatcctcccaagtcggaccctgcttgcgatcggactgtatcaaaatgttgacaagttgactttggctagtgatggccgcaaagacataccaatccgctcgttcgcgtacgatggtcaatgcgcagggcatggcatattgctgttgcccatcatcatcactggagctgacacagacctgcacgaacatgctaccatagctgaagtatcggcttgtgtcacccaaaggcatcatatggaccaaacttggtgtcttgcctgcattatctaccagcattgatctcgtcgccgcaccagataagactgctgaaacatcgggcgcatagaaggggtaacgcagccagatactagtatccagctggctgggagagccttcctccgagttaatcacggcgaggatgttgtttcgtttgatggacatggacagcgaccggagatgatttatcagagtgtgatgtatactcaaaagatcagccaaatccttgtcgccggtggtactcgcaacggccagtagggcgtcaacacccatagcaccgtatcgagagagttcatgatgactgggcacaatattttcatttatccataatgcctttccaagatcgaccacagcttgcttggcgtaggtaggtggcagtgtcgaacgggatcgggcatacgcttccaaccgtgtctttcctcgtaaaaaccaccagaccgcagcccgaatccattctgctagcgatgtttctaccaatggcttaacctcctctgctgcgagttcgatagaactctggtattgtgtattgtactctttgaattcagaaaacgcggtattgccaacttggttcgcaatattgcgaagagaaaacttggggggttggacgctatgtggtggtggctcttggccctcgcgactggggggtgacgcccggtttgatgcagataggtcttggggtggcgctttggcctgtattggtgaaagcttgccggggctacctgggatgagattcgtaggcattcgtgggtcaatggggctgagactcgctggtgcgcgttctgctgaggggcttggggggcttcggatcgaatcgacaatagatctcatcgacagagaaattgatggcgcatgcggaagtcccgccgttggggctgcttcgtggggcgatccagaattgtaaccttttatgagaggttccgggctaggaggactggggggactagggggagttgagatatcatcgtcttcaactccaggagacaatgcatcttcctcatagcgatgatgcagtgcgcgaccttcttccgcttgcatcttatcgcggacgcgttgtgcgaactcggtatcgccgtggagtttcaatcgagcgccgccgtcgcccgcagacaacgtgctcaggaagtcagcatcctgtggattttgcattagcagaggtttccagtccaatctatcacgctgaggcgaacaaacctcttttcgggatcgcgcatcactatctcccagcgatgtgtcaagtcggagatttggcagttgcggacgcgaaaggtccgaccccggggttcccctgctgtccgacctctcacgggcccgcgaaatctcgattgttggcgattccgtctcatcgcctccttcaccaatcacttctgggttttgacggctgaaacccacccgcagccctttgcccttgcgcccaccatgcttggcagaggctggagaggggttggggacagtctgaaattggtctgagaaattgaaagaggcataattatcaagaggcaagactggcgctgacgccgacgccgacgccggcgcaggcactggcttggcgggagggtgtttggagatgtcttgtgaggaaggaaagcggtgggcagcgacggtttgcggagttggatcgataggcgggggggctgcggctgattctggggcacgagagctcaaaaagtctgcgatttcttgatgctgttgcaacgcagccttatgcttatccttggagaacagtttacttttccaatggggctttttcgcgggtttggcctgctccgcgggcagaaaggagaacgggtcatcggcagacatgacaggaaagatagcgagtagacacagtccacatcgcactcaataacacacagacacacacaccaaggatacccgttgtgaaatatcccctccccctgtgtgttgaaggatcgacaggggctttaggcctgataagaattgggatcgaatagcggggaaggggagatgggagagccagagaggggataagaggaagagatgaaggtgtgtagtataaagggctaagtgcagtgtcgagtgttttgtctcaaaatggtccaaaggtgtcaagtgtcaagtgtcaagtgtcaaaagtgtcaaagtgtcgtcaagaggaaggaggggaggctaatctaagcgcccgtgctccaatgaaagactatcagaaacacgattagccccgaattccaaagtccaacgataaaaagcaaacacttactccgtatagagattagattgtcaaggtagctggaccagcagcgtgagacatgcgatgggtaagaagtgaaagaaggtacatcagggggcaaaccttggaagaagaagccctggagatactccgcaggtaccaattgccgcagtggagtcggggctttttgtggatccgatttagtatacgaaacgattaatagggatgtgcatagggatgttcataggcatgttcatagcgatgttcgtagacatttcacactgctgtacagacatggtgcaattccctatctttcggtctatacacttccacatacctcaagcacccaacgcttttcaagccaccaagggcgctatatatccaatcagcatagacaatttgctcgtctcatcctgaaactccactagacccaatcggattgagggacccgctgctgacgagttttgagagctttgaagatcaaagatattcagtgacattgtcatgttgttaaatgatttgatattgggcatccctgcctacgatctactgccttggtacacttcctactccatagttaataatatgatcaagaaaccgcgcattcctaactaacccatcctcatcatatctaggggcttcttagcgcccgaatttcgagactaatctaattaatgaaaccttggattaattggttcatttgttaatatgcccctaaccctcgtataacggtagcttctttccaaattggaggcttggctgtaatgtatcttcctcaatctggcatttgatcagatgcccgtttgccggcttccccgttcggtcctcccgtttccaatagagtactttgctcaagtctctaatttgctacactcatatattcatagatatgaccccaatggctataaatgtctgcaaccagcgagtatatcgccctttgcttgtcaccgctatgtcttgctcttagtagctaggttctatacggttcattgaccaccttgacttgacccgatggattggaagcccatgaaacaaggaaattcaagatcaaccgtgactcggaccaccccacatgtagacaatcaatatccgcttgtaagacccagcgttcatacctgcatatacaccctgaagtagatcgtcccggtttcgggccctcgggaggccgtagaactgcttacgcttacacacaacgcaatcttacctaacaacctaacattgaaggttaactagttagtggagcctctgagcttgaatacaatatgcgtcgtacaaacgtattacaatttaatgaaagatggtggctttgaccttggaaaatccggggtctattatcctgagctctcaaaggcgtgggggaggtacggagtagaaagccctaaatgtctcacaccatacggagtacttcttgtattcttacaattttcggcgcatgaacatactaaataggtcacttctacgcaaaccttgtgtacataatctctgtttgtttcaggccaataataaacatccccacttgacaagctagttagcgatatacctattatcacgataacactgccgagaaaacccttttttttttcatctgaaactttcaactccaaaggtactatttgcgatatataagacatgaggtatgagacaatatgacagcattgtagaactagtcggaactatggaaagggagagggaaggaagactggaggtatccagatacggtatgtgacattgtgagatattgaaacgccaggaagggcagttgtaaaccgttcgctgtcaccttgtttatactaacacaacacagttcgtcgaggaaggatagaaagatagcgaatgtgcggagtactactagattaggcgagagtttacggctttcggctgatggagctgacggagctaggttcgttcaggcttagacttgtgggtgagaatgaaagtgaaatgaggaagtcgatgtggcgttaatctttttgtcgatattcgcttaggggtgaaacattgtatagccctacggaatacacatcggatattcaccattcagtatacttccaagtttctagaaccttatgtatgtctgaccatttcgagatgaatatagacgactacaacattgtacacaaccgggattcagggattcaaacaacttctgtaccgggagctatatacgagcagggcctgacgccaccgtgattgtctcaccacaaacctccatcggttaaaacccacagtggagttagatagctaacgcaggacactagaccctgaaaggtacgccattatctgtaccttcgttgtcgctcaaccaattccgtccgagtggtcagatgaattcaccagcctcaccccgtttagggcaatgtgccacatccaaccaccactggagaagatatcaccagagagtagcccttcaacatcataactcaatagtatagccgacgccaagccttgctggagactgatcagcatgaataaatcattgaacttcaggcatgatggggccactgatcagttgttatgtagtgagacaatcaataatccaccttcagcgactatttcgagtcggccgaaacatatgagggggaatagttcgagaacccatgattctaagacaaagacataaagacagtcttcctcgtaattgaagacaatatcctcacagcaggagtgaattcatgcagaaactcaggatctcagtcggttatttatctccgggggttcggctccagccgacacagtggatggaagatagattggaaatagttggaaatagtcctaaaataggaggattgcgcatatctcccataattttctattttgagaattgtatttcgttcatgatcctactctgtttatccgtacggagtagaagaaaatagtatagcagcctattattagcacaatcgagtagtcagccgttaaactccaccaaggccagaccaaacaaggcgcagcaacaacaggccaaacccactgcgaaaactaagccactttttttccactttccttgtgttttgctctgacttcgacttccgatcctgcccccgggatatgccgcattggacgacttagcggccgacttacgacgcacgcagatttacgtacctccaggcaccggcctaacttcgaacccccccaaactctatcaggcgagactccaggatccttggtctattccctgcagtgatatttttttgtcaatcacagtgccctattgaccctgggaaggggtgcgcgcggtggacgagaccccgacaccgatccattgtcaacacaacgtggattcgatcatctacgccgggggttgacctccccgaggaggtcatcccggatgcccgaagtggacatgcacgactcgacggagatcgagctggacggacattcatcatcctctcgacggaaagcaagcaggcggccgcgacgcagtggattacacattttgcaaggtcggccgtggcccgacacttcgaaacgccgagcacaaccatggagttcggtgtggtggattgcactgctgtacttagtgagctttgcatcgccaggggctgctgttcttttggactttgaaaattgtctatcaaaatccatcctcgagtccgaccctctacaacttcaattcgttcctaccaacgtgtccgtcaaattcaaccttaccaaccctctacacccgctcgccatcacggtctatggcaatgtgtcgggaaccacgtctcaaaccgcagactatcccgcacccgattcctctgtatggacaaatcccaattggaccgatgggaagattgaggatgtgagcactaccaacaacaagtacagcacgctgatgacggatctcaatgtgcttagcttcacgccctttagcaatgcctcccgtttccgtgacgcggtcactcagggcaccctcccgctgggtccggtctttaattacaatatgtaagctattgcaggaagagaaagctctgcgatttttaactaatccctttctcttatgcaggagtgatttgaccacattacgagcgttctcggttcaacatgatatgctttcaacttaccgtttcggaactatcacacccttattgatagttcgctctggagatgcatccgccgttcagctcgcctgcgttttggtgaacgcgacgccggacttgggaacatctctcaaaagtgccattgcctatgtgcctctcatcattttgatactggtgggaattgcgaccatcacggccgccatgtttagcccttggggcacaaccgatctatttcggtggacaagcaactacggccgcgatgaagatgttctccgacttgtcactcctggatttgcagattgcctgcaataccttcaattcatagtattaacgggctcgctttctttgaattacccaggtttcttccagcctatagtgagtcagggagcatggtcgactctcatgttcaaccagagtttcgtcagcactgaaatcggccgcgatcccgttgtggatggtctatatgccatcaatggaacgtatggcctcgaccgaatgaaccacctggttggcatggcctcatctcaggatatctggcctggtatgatcatatgggtgctggtaatcatggcttgtgtgacggtggtcttccagatcgcattcgcgctccgatggctgtatcgtgagttggcaaacaacaccgatcaggatctgcgtgccagaaacatgccgttcaccatggggaatctcattcgcattgtcttcaattttcttctcttgccaatcgtttccctttccttcttccaattggttattgctcgtcaatcaaccgcttactgtgttgctttggcggccgtggtgatcgttattattgcttgcttcgcgatttgggctatccgtgtggtccttaacactcgacccaaagctcaccttttcgatgatcttcctacagtgctattgtatgggccgctctataatacatactgtgacgatgcagcagcctttggtatcgtcccaattgtattgaacatcgctcgcggaatagccattggtgctttgcagccgtctggtatcgcccaagtggtaatgctggccatttgcgaagttgtgtctgtactaaccctgctggctttccgacctttctcaagaccaacccacatgaacctgtatcactgcctcttctctattgtgcgtttcttgacagttattttgagcgtcgtctttgtgccgtcattgacactttcggatgcggccagaggctggatcggatatctgatccttgtgctgcacgccgtggttctcattttcgggttcttcctcaacgcaatgcaaaccttgatcgaagtactggcaagactggctggtgcgggcggtgccactcgtggtggcttgacgaaggtgcttggcatgcgccagctctcgaggcgcactccgcgacgtgatcttactcgccagagtatgggttcggaggctgctatgcttggtcacggtgacgatcgtatgtcatctcagtttgatggatcgcgtcctcgcagtctctctgggagctctggtctgcttttgaaccgtgctagtgatggcagagtcagcaccatctatgattatcccagttcgcaaggaggcacacacagccgtgctgctagcgggggattccccacacctacctcaaccacctatcaaggagctggcttccctagctcgcccagtagtggtaagatgatgggaacaaaccctcgtgatccctattaccggccacctcgccccgggcgaagaacgcccccagcaagtggtgctctcgcgaaggggaagagcccgtcaagaggcttcttgaaatcaaaatcaagccgccgagcagtcagcatcgatgacgacctgggagatggcatgtctggccgtgctacaccagttccagcatatctagcaacgccgaaggatgatatggagctcgatacccctcgcaagccgaaggattatgctgttcgcgaggttgatttctactatggtgtccgaggcccaccgctctcccacagcggtacgcgaaagttgaaaactggcccagccgaccccacaggtccagtctcgtctgcgacgggctggttccgaagcttgctccaagggaagacgaaagacaacgccaaaggatttgaggtggtccgaagtgctcgtgcgcctcctccaggtctattcccgagaagagacgactttaatgatccttatcaggatgatataggcatgccatcagccagtcattctcgggaagtgtctaccggcaatgttccctatcaggattcggacaatgaccacgaccccgaaccgtcatgcccgccagtactgccacaaattaatacctcaggtggcggtggtatcgaattgcccagtcggacggcctcttgccacacacaggcgcctggtgaccaagacgcaggaactgcggctggccttccagttgtgaccgagaccctgtctcacaactctgatataagccagcactacgagcactcagagcaccatctccagccagaaggctccaccaccgcgcgcctgcctttcagcggaagtagctcgccatctcgtgaacgaggtctgtctatgacctctacttcaaggtcaagatcaaacgcctcgagccagcagacgggtgctcgaccctcgagtctgggctatgtacctcaacatcgcgcgcacgaccacatccacgaggggagccccgacgagccatcctttaaggggagcgcagcagaacttgtcgatgaagcttcgctgggcgggcacgagcgttaaaagtatgaaaaaggcagtcacatatgtattttgaaccactatattcgtcttcttcgatatctacctctctctatctctgtctcatggatctcccgccacttattcctcatctatggatatcgtcaccaccatctcctgcccgaaataccggcgaattgatgccaccatcacgaatctccttgcttcctgtgcgtctatctcttgctttgtttgtcaacctaaaattgctgcaacggcgttttatctctgatcccgaggtacacctaatggggagtgaactcattggcttcttgctatcttcctggctgtcgctgaatccagacgacatgctgttttcttttggaggctttgcttctttctgtatctgtctcttttcgctcttcttgtatcaatcttaggacacactaatgccgggatcataattaatgaggacttttcattagcgcactctcttagtggtaataataaggtcttgatatgtcttagaactagtaatagttctcaactatataagcaacgtatatcttctgttgcaattatcaattgaactatgggaggcttcgagcagagcggaaagaaacaaccgaacccgatagcacgcgggcagaccgggccgataccgtcaatcgccacctccctcaccgcccgccccacgataacagcctgtatctgggcccaaacataacgcttgcaccatttcctctcttgtctctgtgagtcaagtgtcaatatccttgttttcttctttgctgttgccatctgctgttgccatctgctgctggcatcgctactgtgttgctggcatctgagagcatagtcacaagactctcagcctcatcatctcctaaatacgacccaatcagccttggctccatgataagcatcatcctcacactccttaatgtgatcttcggcaaaaagcgtcaacgtcattgaagctgagcccaggattgcataaaaggacctcatctcctacacctatattctcgacatccccgccatatattcccctcgtcatcgccactcgccacctagttcatgaagactgtcattccaacggccgagatcgatctcgttgcctctgtcggacagaatatcacagaggatctataccgttgaacttagcaatcatgcctgggtcaagcacggcatctagctcggttcagtccagctccccgccgaggatgcaggcaggcacgaggccggtcgaaagaccagaggggcacggcacaacacaacctagaagctacagcggctatgaagaaggcagctccaggacgagagtctttcccattcgccccaggtcagaacgtaaaagacgattgaccagtaccggcgaggatgcgaggtcgcaatggggacagtctggaggcacggctggaccggcccgagacaatgggggaccctccagaagtatcttgccgcatagatctgtctcgatggtattgccttcgtctcgtactagaacttctatatccacagcacctggctcgtcatttgcaacagcaattgatatctcttcctctcctccagggacgcctcgttcctctaattatggcgaacaactaccgggtttctctcgacgggagcatccaacaccctggattaatcaatctcgctccgttgcatctgttcacaatgatctacatccaccatttatggatatggctctccccaaatggcaggcagattcggacgtgtcagaatgtccgatctgtggggtagtattcagcttctggcacagaaagcaccactgccgaaagtgtggaagagtcgtgtgtgcatcatgctccccacatcggatcacaattcctaggcaatatattgtccgccctcctgagttcgttgacttccttcctgattccccgccaattccttccaactctccatcagtcgtcgatctcacaggcgatgaccctgttatatcatcatcaccattatcatcaccatcagcatcagtagcagcaacagcagccacactcaaccctgctcttggcggaggcgaagaagtacgactttgcaatccatgtgtgccagacccaaacccgaatcccattagctacagtaccgtgcgggcacacggccaccgacccacccattctctttcatccactatggccaacacataccatgcctcatcggtaagttctcgccactttacttaataaaaccaagctgacaagaaaacacgcagggtccaagcaatcccgaagctcgtcaggaacgacgaactgtgggtgtaaatgatcgaccgcagttcttaaatgagttgaactcgcaaactcgccaagttccctcgcccaccgctggcatatcccgaccacatcgttcattttccaaccgcgacggtaacccaacccgcggacctgcgttgaacgaagatgatttctgccccgtatgcagacgtcaatatcttccactgagtcctgaacagcctctcgaggcgcgccaagctcatacccgagcgtgcatcgagggttatttgagaccaactgccccgccccggacatcatccttgcaacatgatcatccactgccccatcctccaccggtagcccgtatgcttccctttgtggccacggagaaagactgcctcggtgaggatggccaggcagcagagtgcacgatctgtatggaggactacgaggttggacagaccctggcccgccttgagtgcctgtgcaagttccacaagcactgcattgttgactggtttgagaggaagatggagtgccctgtccacaagttttcctaatagggtgcacatccatctaatatgaatttcaagaaatatttttgctagcttagctttttgctttttactacttttggctcacggcgtctggtattttgtttcttatatcccgcttagcgtatcaatgaatctaatctattttatctcgaaacctatcagatgctgatgcagatgccgagggtatgtaggatcatcagtcacgtggcccctgatgttagttgaaactcaaaaatcaaaagcacttcacttcacttttggccccaaagtgaagagcaagtcaaacaggacccagtggtattataagtgagaggtaagcctggtgttatgcattccccttacttgacattattccgatgaggtatgttgatcctccacatcggtggtcggtgtttgtgatcaccgtcctccgttttctcttgtcgcacagccgaggtgtcagcaataaccacactgaaaatgggataccgagcaatcacgtctactgatgaagaattggaattaacgcgaatttgtaacagtgataggtccccgagccggtattgtaatcccgcactgcatggaaatcgatccgcagctgcaacacgcggaccctcagcggtctttttatacaccgatccgaccgacaatgagcacaggcccggaatacccggagcccccatcacacgcacccctcaacccttacccaagccgggatacacatggtgatggacgcggacacgagcgtgggcctagggacacgcacccatcattcgggatgggcccagacagcaaccaatccccagatccgcatgacccaccaggcgacgccaaacggtcgcgtgcatgcgagccatgccgacagctgaaagtgcgctgcgacccagacccggcgcacccggaagggtcatgcaagcggtgcgcgaaagcgcggcggacgtgtgttgtaactgcgcctacgcgcaagcggcagaaaaagaccgacagtcgggtggcggagttagagcggaagatcgatgctctgacggcgacgctgcaggcatcaaattccaccagtgcgctgttctctggtggagcggggcaacgggatgagccgcttgctggtcgaagatggattgctgggagcaagcgacagcataccggcgaactcaaggatccctctggtgggctgttagcgccgcggtactcgcggccgggtagtccatctgcagagcagattcctagccatgcatcgaagcattggcgcagacctgttggtgttgattctgcgccgccgccgccaaaacatgaggccgggaatgagtttgctgatatgatcgatcgcgggattatagattacaagactgcaagcgcagcgtttgataggtatatccaccagatggcgccagagttgccttttgttgtttttccgccggggactacaatgggcgaggttcgccgcaataagccttatttgttccttgcgatcatcgcggctgcggttgccgtcttcaattccgacgcacagccgatcctcgtgaatgagacatatcgtctgatcgccgagcaggttgttgtcaaaggccaaaagtcgcttgagctggttcagactataatggtctgttctatctggtatctcccacccgataacttcgacgagatcaagttctattctttgatccatatggcggtggtcatggcaatggaacttggattaaaccgtcgcatttccgataatagacgcagcttcagcgtgatccgcgaactgatcattaaaaagccgacgggtccggcatttgatccaaagggaccggaagcaaggcgaacttgggttggctgttatttcttatctgtccagtgtgtttcaatccgggttgttatggtatggagatcgcaagctaactttggcaggatgtcggcggctctgagaagagtacacttggtcacctggcagccgtatatggacgagtgccttcagattttagaaacccacccggatgccctaccctccgatcgaaacttgaaatggtggataaagctgggatcgatcatggaggatgctggaaatctcttctcggaggaggatcctgggtgcattaccaccttcgcggacagcaaggtttggtataatattaaaatgtttgaggatagattggcacaatggagagaggaggtcccacgggacgtttacactggtaagcgctgatcttgagaatattctttaatattctgctgacatccttctagagccaatggttcacgcagaacatgtcctgaatctcttcgtccatggatctgcaatgtgtgtggactataacacggtcaacaactctccatctcaggatgatttgcataactcatcgattgcgattgatgcgttgagcacggccatccgctgcattcacgagagtctagatgtcatttgcaccatcaatattgaccgacttatatccttgcctacgacatccttagcgcggacatcgtatcccgtggttagtttgataaaaatatactcactgttcatgtcgccggacagtcgaattggtcagattctcgacgtgcagagtctcaaactcgattattatttggacaaagtcatcgcgcattaccgtgccgccgctgcgcgcgatggtggccgtgcagcagcgagatttggaaacataatggttctgttgcgcaattggtttatcaagaagcgcgaccagggagatcatggccgggaattgaaggaggtcttttcgaatgatcagaaatcctccgatcaccggcaggcacatcataaccctgataccccgaacgcggtatctaccaatccaagagcgcggatagcaccgggcatgacacctcttcatttcctcagcgaagtagccatgggcgacccagcgcaccgagcgaacaattccaactcccaacgctcgatagccggacaatcttattcctcaaaccacagtccaagctcaacagtcaacccaatgccaacgccaagctcatccaatttcgtgccagatccaccccaaaccagctggtcatctagctcatcatacccaaccactctcccgagctcagactcgaaccatatcgagacgaggggttactaccaaccctatccatccaccgaaatcacacagaattatccagatttaccgtcgagtacccagactcagggataccctgacatgtccaccgtggctggagtgcagcttgctcctccgatgggaatggcacccgaggtaggcatggacccgaatttcggtgatccttggtttacgttagggaatatgatggacgagggactgtttacattccctctttcttttgacgggaatttcggattgttttagtcggcttattgtggtgtcctgtctcctttgctcattatacccgttgttgtttcgaatgtatatcaatttcactcatcgcaagatgcatcatcttcgagggataggctcggagggaagccatgccttttcgcattcagtcactctcgtaaggggaacaccaaatctaactaggattagtgaattacgaggaacacttcatctaggcagtaagagtaaggcttattccttaggaatagtctagtgaacagtataacggcaagcaatgatttcctctgatgtattgagaacgagaaacctacgcgttctcggctacggagatttacacccctcatgtattccgtgggactcgtcaaatggcaannnnnnnnnnnnnnnnnnnnnnnnnnnnnnnnnnnnnnnnnnnnnnnnnnnnnnnnnnnnnnnnnnnnnnnnnnnnnnnnnnnnnnnnnnnnnnnnnnnnnnnnnnnnnnnnnnnnnnnnnnnnnnnnnnnnnnnnnnnnnnnnnnnnnnnnnnnnnnnnnnnnnnnnnnnnnnnnnnnnnnnnnnnnnnnnnnnnnnnnnnnnnnnnnnnnnnnnnnnnnnnnatgcagacctacatggacctcatacatatggtaatgtcatggtccctgtggtaggtgaagcaccatctgctacagtaccctttgcctgcgctgtctcatgggggctacggagggatggtggtcagagggatggggagaggagaagaagaagaagagaagaggagaaatggggggaggggtcattttatacctcaagcccatgtgccttcctaaagtgcgacaggtccctcgcaccttccctggcaatgtcaatgtcacatgtcacccatgtggatgatccgatataaacatcccaggttatatcgacatcaacatccattgaaattcgtacgtctcggagaattgcattctccgcggctccgtacactttcagcacagcttcgcaatcaagatctactatacatcccacattccaaaccagagcaataatatccgagaagagcatatcctattcgtggcctgcagtcaatttgacctgcctccagtcaaaatggcccctcatgaccccaaccgtgtcgctagcatcatgctctcatggcactcgctcgagctcatctcgtgcaccaaccttcaaaccctatgggccgggtatggacaaatatgcgctatcacagcgcgagccaccacctcccaagcagccgaacatctcagcaagctgtgcggggtagagcctggtgttgtggggacgacgtatccccttatcctgaaactcatctcaccgccccgaaaaagcgccagcactgcagacgagggccatctacggaaaatgctgagctacgaggtggaacagtacttctatagcgaagtagtccctcagctgagctgcaacacagccatagccaaatgcgttgcctcgacgcgcgacatggactactcggcagactcgtcggaactcagcggtcttatggctacgatcatggttgatctgcgtcctgagttccccatcgcgggtgagaagagaggtgcgctgaaccgcgaacaggttcgcgcagcgctagactggctagctggattccacagctgctcaaggaaactactgccatctagtcttgacggatatattctgccgccgcttgaagaacgcaatagaagacagagacagagcccagacaaggatgttggtagcgggctgtggctgaatggggggtatacgtacctcgcaacgcgacgtaaagaatacgcatctcttgcacaggacacggactcggagtggtcagatgcgctgtgcagggtttcggaagggtgctcactatccgtggcggagatggttgcattgttcctaacgccctgcgggagggcaattgagtcttatattcatggcgatgtcaagtcggaaaatcttttcacgactactaatggagacaaggtggccttctttgacttccagtatgtcgggctcggtttgggagtctgtgaccttgccaaattgtttacctgctcggttccgctgcatatgctagttgatggaaatgggagtttgcccgcacagctgtcaatgtgtgatgccgaaagggcactgctagagcgatatcgtatgagtctcctccaagatgaggaatcggaggagtcagagctatacgaatgggaagcgttcaaacggcactgggagacagctttggttgattggtgtagattccaggcttcgtggggattttgggggaatactgagtggcttgaggcccgtgtaagatcaatcttgaatgaccaggagtggagagactggctgtatcagaatatccgtggtcgagtgtaggatcatataaatagaaatgcactgtgaatatatcttcaactccatccagcttttgaatagtgaaaatggggagatcagcggttatttgaccttcctacttaccagttgtttgtatgacttttgcttgatgattcgagataggtcctgtttcttatgctgtcgcagaatgaaaatgtagtatgatcagattggtggagctgcctgagcctcacagcacgatcagcgcctaagaacaattctaattggtctatatcatattatatgtaaatcaactgggtatataactatatcggcctccacgcttgcataacctggttgcgcatatatccccacggccagccgttttccctttcagttcgacgaaggaggtcaatcagcaaagtttgtacaacagggtcttccacccatgagccgcctgtaggcatattagtaaactctccctcatagaatgcgaacaaaacatacaggcaaaaagtgcgtgacaagccgtgatacgcagtgaagggtcgtcgtcggcagatgtggcgatgccgaacataaaattaagcgtttcggccagatcatgctgtcggagtcagcataaaatcgaggtgtttcaggggggggggaagacaaacccttaacttgacaggctgctctaaatgcaacatactccgatcataaaactcaagttcgcgaatgagcaccaacgatttagtgagacagatgtgctggaccgcagtagctagatccaaattagcacctcatccccaacgcaggcttatatcacataccatgccacaggctcgtataccacgcaacaggaaaaggtttcccattcccaggatccgccggcgagatatgcaacggcacaaacgtatccggtcgaccaagctcccactcaagaatgcggtgcctgagcgcagcctcccccgcactgccaagtctaccgtcatggcttcggccggagatattataacagaaatcgatagtctcggccaatagccagattgcccggtttgtccagtctccgtcgctcagggcaggtttggcggcccaccatcgtcgcaggcggtcatcgaacggcgcgaatgttaagcggaggcatttctggtacgtgagcgcgaattgaatatcttgaatgacataggcccagaaagaagccgatgccagtccgcccgagatagctgagtccacgtgggaactgatgtataccgaaccggccaggagatggtgttgttggtcgtttgggggactatgggctgttgagtgcgttagccgggggtaattattttgcgttgaagattggtgatccacgcacaggagattgattcgaaaaatcgtagaatgacggttgacgagaggaggatgtcgattccgatttcgaactcgggcttgtcgaggaccggcaacattattgagatacagcgctcatgatatccgtgtgcgacatcgccggcgatggagttggttgttcgggataggtgacatgctgagactgcgagacaagcatacagaagtaatggggattgggtcgcgcgctcgatgacatctgttgagaagtgtcggtcgggattgaatgcatcgagctgggctgttagtggaaaggcggcgaatgtgataacagaccaacttacccacggcgccaggtacttttgaaaatgtcgcaacagaaaggcttcagtgacattggatagcctcgggtggccaatgggcgtgggcgtggtggttgcacgtgacgaattcccagaattcgatctagagcccaattgagatcctgcaaaggcaggaaggacgagggttggagttgccaatgaataatccatcgtcgatggaggcgtggaattttcagacgatgaccgtgaagtcgacgcctgccttgtcacaggtacaacatagtattccgctgccgtctgatctgtttcgtccttgaagtggactacaagaaatcagtataggaaacagacgcggagaacattccacatacagctggaggacgtttcaacccagacctggtcgtccgggaaagcaagatcactctcgccatatcttggaggcccctttcgcaaggatgggttctggccgtgtcggaaagagatctcttcagatttgccgggggccggcacacattcgcgaccagagcgttgacagcggagacatttcgaaccggatttgtcacctaattctgttagtgccgagagcagagattcggagtaggcaacgtacatttcagatggcgcagacgacatgtgaggctgaaacgacgggttagtcgaggtcgagtacgcgtaacgaatcacaagaactgaccatcccctcattacgcagtcaaaaagtacaatcgcaaacaaggaaatcttccagaaagcatatttggaataccaggcccgagggtgagatatgtaaatagggtaagtcggccagtccgactatcaaactcaaccatgatgtctattgggagactaaccaacgcccacccaggcgagatggtgtggggaccgaaaatttggcagatcactaacggattgcgtattatttttggggtttaccagcggctacgttttaattggagattagttcgaagagcttagagctaacagtggttgaaatgtcgaatagcgggtttcaaatgtactggaaattagctcaaaccatatcccgaatgtggaaacgttcaatatccgagctcatcacgggtctgaaaaaggtccaatttccacgggagtctaggcagcctggcgttggtcgtggttgggcggctggcttccccacatatcagactaagtttcatcgaaaagattctgatcgtttacctaagaaaagatcctgtgacatgtcatggaagttccggaatcgggttctcggcatgatagttggccgagacattggaagttgcactcggtacggaggagtttgaccgggcctgttttatcctctttgcctcttttccttttgcctcgttgccgtcaattgtgtctgcaatgtagagaacctattccgaaagaccccctcagaaggtatccggacataaatcggtataaatccggggctgattgtcaggtcagaacttaaaacctttcaagataaaaagacaaagcgttcgacaagcaacgggaacgaaattagaaacgaaaataagaacgaggttagtgttgaagtcgttcggggtctcctttgccgattggcctcaccggtcctggttcaggcaccgtacggtccagccacatggtacggaggaccgacatggatcactcacagggaccttctcatcccatgacaaggtgcgccggcaatctccgtgtgaggtaggagtaccaggccttgatcaatcctggttgtcggtggatcttcgatgaaaatgagattttaattccaaacccgtggaaaccctgtcgatctcagaggcacttcaatatgttgtacgccgaacagacgatcccacacctcccgatgctataaagttaaaaacggtccaaacaccagacaaatgggatttgcatatgtggggggctttctgttaccagctgcctctttcggccaaatgctccggggcgaaaagccacttgcattattcatcatttgatcagcaccagaagtttcaatccacggttgaattggagcaggaacaggagaatgaactgtgtggggagaggaagagagacaagagagaggaaggagagtcatgtggtgcctgaaattggtgcctgaaactgatacctccaagccttgaatccaaggcatccatgcatatcccaaaccaagctattccaacttcgaggtttcttatctttggagctccctgctggtctcgtagcccctgaaaagcttgaattaaacaactgtttccgttcactactgtggtgaaactgagtcaatcccaaaatataatgccaaatgtccctaaatcgcatctccttccttgaaggatgggaacgcaaccccgcggccatcctcagccaccctggatcggaggattcggaccccgactcctaccaggatctgcccgagggatccatttcatcttcatttccctccacatacagcagactgaatttcaacccgtatgcggggccaggctggaatgaaagcccagaggatccacacgaggatcgatcctcgtttttcgggccctcatttctgggcttgtctccgacgactacccccgaaggacgtgcgggtccggctccagtgccgggactgggatctgctgagcggactgcgcatgattcagagacgaccgttgctcgcacgccgccttgggccgatactactggtgcttatgaagtgagcgctgctaggaggattggtaggttgatcgaactcgcattatacttcttttcatatacagtggcatgttaacattataaaagcccaggtttgcacggcagtcgtatactgttttctggcggccggggttgttttcggctttgcagctctcaagcccatccttattcgagagaaagtatatcgcgacctctgctcccaggcggaacttgagaaagatgtcgatgtatgctatgggcaagagattcggtatgtttcccccgtggttgaagatcactcttacttacacgcaacaggctaaacttgatgtttactatcgccgctgtagtaaccaatgtctcagccctacctgtaggcacaatcctagacacgtatggaccacgagtcagtggaatcatcggcagtatctgtctcaccataggagcagtacttttggggacagccaacaagcttccattcgatggatacatcccgggttacttattcctagcactgggcgggccattcgtcttcatcccatccttccatctatcaaatacattccccaaacgatcaggcctgatcctatcaatgttgacaggcgccttcgacgcttcgagtgctctattcctgcttttcaggttgttgaacgagcacacgcatggcgtcgtatcaatcgacaatttcttcgccgcatacctcatcgtgccggtattcatcatcgcagcacagatcttgataatgccgtcaacatcatacaaaaccgccggcgaactcgtgcaacaagccgaagcacaggtcgtagatgagatgcgcgatcgcatagatgacacggtcaatgaccgcagcgagcgcgagcgccagcgtatggacagacgactccgtcgccaaagcatcgtcagccagatccaaggtctactagatgatggcacagcatccgtaatttccggcaatggcatcaacgactccatcttccacacgaacatcgacgcctcgctcgacgtaaataccaccacaggagttcacgacactccaacaccgccctcccaaacgcaccaacaaccaaccgctcctcatccaacaccaggcggaatatggggcgtgctccacggccatagcgcactgtaccaactacgcacaccatggttcgcactaataacagccttcactgttctaatgatgctacgcataaattactttgtcgcaacgctgcgctcacaatacacctacctgctctcggccgagaaagccgcacaaataaacacaacattcgacattctcctaccagtcggcggactcgtctccgtgccgttcatcggcacattcctagacgtattccagacgcgcactgtgctcttcatccttgtcgtgtcggcgaccgtcatcggcgtgctgggctgtataccgcatccgaccgcggcctatgggaatatcattctcttcgtgctgtaccgaccgttctattacactgctgtatcggactacgcggccaaggtgtttgggtttgcgacgtttgggaaagtctacgggcttattatttgtcttgctggtgttgggaattttgcgcaggcgggacttgatgcgcttacgttgagggtttggaggggagatcctgtgcctgttaatgttggacttacggtgctggttgctggggttggcagtgcacttgttgggtttgttgcttatcagacgagtgttttgagtgggaataagggtgacggtgagcatcatcaggatgtcagggagagggagccgttgttgaggaatgaaacacctgggagagtgtatggagcttgatcttatgggcttgatatgacggaggcgccttgtttgtattaagtatctaagaatgattatgaatgtgaatgtgattggatatgaggatggcacatgggagatttaaggatatttagggaaatcctacaagcactaatacgagaggaccatagcaatgaagactggaatatgaaatctggagacgtgaacattagaacgttatgtattatatctcgaatggttgctacccaaatagagatgtactatatacagatgtacccaaacatccaaagacgacaatagggcgcgaggaagccacagcctatgccagggcatattataatccagatccagacccaagagtggatctattatatccagtgcaatccaaaaaggaagaaagagtagtgcccgggcccgggagtgtttgtgacagtgttcgggtttcacagcacggcgagtttaggcaggtttacgcaaaatcgatatgcccagtgggtatatctatgtatgccccttgtccaagttaatatcgctggtgattgcgatgatacaagcccaatatatttttgtatgtccatttcaaagaaaaccgaggatgacaacgatagtgaaaatgagattcgaaggacggtgataagaaggctggtctgcgtcattgcagctcacggcagatcctgggaggaagcgcgtgtattcgcgcttcatgaggttcggagagattcccaatgagggaattgggctgctcattggatggcatagctatatttactagcgccctcctgccagagatcctctgcagcgcggtcacaggcagcttcgtaccataacatagttgcgaggacggatttgatgctggcccatgaattcaagccagtcctgcgagttacatctcccagagcagaggcaaaccaggcgcgctcgggagcatcgttcgctgcgataccgccgagggtcaggacccagatgagagggacgcgtgtggatggtgaacaccacagctctgaggacgagggtttgaagaggacggcctgtataaggcgcgccagggtactgaggggagtattctgggcggggattgggaagagaacgccgaccccgaagattagtgccgctagacggcaggcttcataggtggcggcacgcgtgggatgagagaaaaaggtggagatgtctgaggctggagagagggagaggagggtatgttgggtcaggttacgctggtcggcgagcaaagaggtatctggtgtgaaattcaggctcgctttaatgatcccgatataagtgtgcaccgcttggaaggcttctgccatttggtgggtggcgccaatttcctgcaaacggccgaatccctggtcgacgtctgatgggccgaagccgagcatttcttggacagaccagcctaatcgggaatcggcaaggggccagaaatcgaagcatgggtggacgcagaggacgctgcagctcatgatatccgagctatgagtggtcagtaagggcagtcagtaagaaaccaaaaagaaccgagacatacaaggaaattgtcgcggcgagaccctctgtggggatatttggcaatccacctcgcagtttgaccaactgcaacagtcctttgatatggatcatattcggtggcagacagccgtagacatcaatccattgtagtcgcaggaaaggcggattaaacggtgttctgcggtgctgctgtaccaatttctcctctgcctgatgatgagccatgcaaatgacactgaggagaacagcgtcgctgaccgcgcgatcggggtcacgaacagcctggttgatcagcttgatcgattccatttcacacagctgcagcgcacgacgctctctctgaccaaatacggtacccggcacccagttattctgccattgtacacggaggtgacacagcgagccaaacatgaaggctgtaaataaagccgggtccgccatggacagatcaaaccatttattagccgcagctctgacattcagtggccgcggagcgagtcccggccacacaacacccgtaagatagcgctctgacagattgatcatctctggctcgaagctcttcggggcggggtatgttgcaaaggggtcgaagactccagagaggttgcgttcaagccgctcaggagaagagcgatcattgaaccggatgacagccagcgcctccgaggagaacgtggtcacggtactcgcatcgtcgctgctactgctatcactgctatcgctggcctgggatggcggaaacggcgagtctcggtatgcagcctggttggagcgggagttgtgcgcaaaggtgaattgaccggggttgctcccccgatgggagctcgagggacgcgagacgagggtataggagggaccgggaccaggaccgggaccggcgtgcgcaacggcgggtaaggcgcggacaggtcggatgcgtgaactggatgattcgcctgcggatcggtcctttgtttctgaaatccagcgtccgacatgggcacgcaccagacgctgggctttcagtcgttcggtctcggaggcgggtctagcattgacaaaatgaatgctatccttcttctgtttctttcttgacgacatcaccggctcggcaagcggtgagagatatatgtaacagctagatcctgcatgatctttccgaaggggaaaagaggttgaagctcaaatggaggtttaaacaaggtgatcggttattgatattgacagcaaagccctatgtagatcatatcagacaaatttgacaattttttgtgacttttgacagcctcgaagatgtttgggagtggggaagaaaagggtaaagaggaagaagcttgggagctcccgtgaccgcagatcaatcgcgtacttttacttttatgatactccttttttattatattcgataattcggttctattatttgcttccaggctctgattcaaggattctattactagtacgtgcattctgacagtggtggagtcttctgcatgtgtatagtgactctatattgcacggagtattctgatctattctgtctgaagaggacctcctttcatagagctcaaggaaaaggactccgaatagccgttcaatacgaagtcgatcctgaaataagattgccaaacagggggttctcctttcaatgttcttgggcccagtcattccccgggaatcctagtatagtggacacatagaatgtcagactattgccacagcttcttttatttccatggatgctatgacactcttctacggtacaagcagtccccgttgcaattctatatcccccgcggtctagatgtctttgttcgaggggaattcctattacaatccgtggtagtggcagggtacgttgaactgccatatcactacattattatatacggagtgcgtcaatgctcgacggaaatatgattcccacggggtttgaccttttttgataggcctatggaaaagaagggaaaagaaaagtggctctgataggtgggaccccgtcgatcgtgaggttaatcatcttggagtggcaattccagtgaattcgacggagtaagtctatgttgtagatacttggaaatactattcattatgtctgatatagaagcacattgtaattgaattgttacatttagcctctttatgcaatttacatgctaacctagtctttcttttccacgtttgccttttccccatattatagagcttcattgttcctctgatgcaagccaaccggaatatgagacaatacgtgcttgattatgagtccagtcagcggccttctggttatctacggaatactccgtattccgtactccattcacacctcgagtgacgagtctcctcggccgaaacggctaacaatcactatgtattcctcctagtgaatgcagaaattcctttagctacaatttcccacctgtaaacaccgtgctcggatccgctaacccgcagtttgtgacagtaaagccccggttgactccgacgtcccctcatcttcagtcctgccgtaccgaagatctgcaggaagaatatacgtatagcaccgagaaagtacgtgaagaaaggctagtggagaggtctagacaatacacagctaatcagcgtggggtttgacgcctgacatgagggatatatgatatgtgatggcatggttagggttagcgctgacatcaggtagggtctgcatcgactaagactcaggtgacaggtccactggcattggcccgtcgatcgacgagaacatattaatatttagctagtccgagtacggagctggaaaggatgtgtgtggggatataaacgattgaagtaagaaatagcgaattgtcgagttcacacaaattcggcacgaaaggcctttcccgtgcagatcgacgagaattccgtgcagatcgacggagacgaaaacccaagagaatccccacagacatgtcaacaggccccccgcatatcaccacgcatagcgccgttacactgcatttatccccgtcactggaggaattggagctgtcgagaaaaaaaggagagagaattaaatattcgggaagaacggtgaactcgacctcgaaggatttcattgtctcggctccgacgccgctaagaacccaatcatcctattgacagcatacgagactataccaaatacgatctagctacatcactggctgcatgcactaacggggggataatataatatactccggactagtccggaagatctccccatcgaattaacgcattccaggctagtccaacttaatcaatttccaacagggtataccgacagctctcactggtctgtggatcatggtactgctctaacgccttctccacagcagccatgtagccaaggacatgctcctcctcccagcggcgaccgacaacctgcacggcagtggggaggccagccatcttggccgagtcgtagtgtttccatgcacctcgcgcgatgccgttgtcacagcccagacgctggaggacggttttgtaaggtgcgtcgagggcgtcgcggatagggtctacgtggccgacagggatgacaccggaggagtagtcgagcaagttccacaggaaggtgtaaccgcacgaggagacggcatcgtgcatggccttatgcgggagagccggggtagcgttgacagggcacagaatgaaatcgaattgttggggctcggcgtcccaccacttgtgccaggcggcgcggaacgcttcgcgctgggcggtcagggtccagacctgggcggaggacttggggccgaagtcgcggatgagtgtggcggtgaccttatcgcggcgaatgtagcgcacgtagaggtagaagagatagcggagtggacgggggaggttagcgacgcgggtgagttggatggcgcctgggtcggagggttcgaagctcttgaggttgacgttgaagtgatggcagccatctgagttgagaagttgcgaggcgagattcagacccgtgaaggggtctgctgtgggtggggtggtgatttctgagactgtgtggccggcttctgtgagcgcagctaccgttgttgtgatggcgcgcttaatagccggggttggggggacaacacctagagatttgtaagtgggctgactttgactatcagggtgagtgtcggtacataccatcggaggtcatcacaccaatgcgaagaggtttattttgagcctcagactcgacctcgctgcgccaggcaatggggtgcacagtatgctcatatttccagggctccatacggataatcgcacgagtgaagtatgtcaaatcatccaacgtacgggccataggactaaagacactaggaatgccctcctggccgggcatgctggtgttcacgccgcccttgggccagcggccggtgctgcagcggagcgaataaataccactccaggcggcgggaacgcgcaccgatccagcaacatcggatccaataccaatgcggccaccctgagccagcaatgctgcctctccaccggttgacccaccgggcgagtatgctggaacatgtgggttgcggcattgaccccaaagcccgttatctgactcgaaagagagcagggtgattggcagagcagtcttaacatatgggacagcgcctatgaaagtcagtatgtaatccagctcccaacgaacgtgtcttaagagccataagcttaccggcgtcctttaagagcctcaccacaggcccatcttccaagataggctttccagccatagcagcatatccaacagttgcatcaaatcccttaacgtgaacggaatccttcaaagagaccggaataccagccaacggacccttcaggttgatttctgaccccagccatgactcggcctcgggcagcatcagctcggtgacgcagttggttcgctcatgagcccttttggctacctttccataggtgcggaggacatcgagtgcggagacagtcgagtcgtggacatcatgaacaagctccgcgataggctggtcgatagtcttccggtcctggtcggaaatggggagttgatactgttgcggaagacctgcaaagcggagttcccgttcgctttgtttttggttcctgtagatattagccccggatcatgtaagctcgagaggagaaaggcaagcttaccgtatgcgacggtaggcgaagtagtcaaatggaggaagcataatgtcggtgtgatacaaagaggagaaggagggggaagatggggggggttttatacgatgcggagaagtggagaagtggagaatgcgatatgacccggctagacgggtagcaccgaggttagccgtggacaccaaccctcagggctgttttgattgtacagttatatctagctatgtcgtacggaaatgggcaatatgtatgtagacttactttatacttgggtgaggtctgctttgatctcgaaaccctcaaaatatcggacaaatcaccgaccaccagatgccagcggcaatttctccgcagaaaagataaggagccactgcccagacacgctatgcctattgtggtaagtgcatgcgcctcatagattagatgccatagatagacgagataacttgatgagatagaggattaagattgtctatggtatgcagttctatataaaagctatctaagcaaaatgcccaacgccgtatggggggcgggtatatctccaatgccatgcaaactccagttcaacgccaaatttcaaatcaaatcaaaaacgcttcactagccaaagccggttattgagcagtatccggacgaggctggagccagttgttcttagcaagccaccatagaaccacgctgacaacgatgacgagcacgacggcgaaaaaaatgatgaagccgcaaatgatcgaacgcttgctcttcattctttcgcgggtaagccatgatgccctacagggggtgagttgaggttcaacaaatgtattggagatgagggtatcttacgcatcctgttttgcttgtgcccggtcaattgcttttgactcttcgtccatgtgaactgcagttgagaaccgtttccagaaatatgggtctcgaacaagagccataatgatatgctatcgaaccgaggtggatgtgttggtggatgcgttggttgttgcgtggtgtcgactggatgactgaagggatagtcgccggaccggctgagaagaaaacaaccactgatgtatgaggatgcaattgtaaatcgagtggtgaaagtggtgtgggtatgtcccatcaatgaggatgtcaatgtattcgatcgaagcagtgagttgaagatgggacgcacactgattcaacgagtagagtagaaaaaaaaaactttaacaacacgggctacggatattagttgcgcctatcctctagatagaggccttagcgatgaaatgccgcgtgtggaattctaaccacagacacatgtacatactcacccgagggctggaataccaatcaaaccacgatcgactgcctatccaattgctgatttgtgtaaaaattcccaagctcaggccacggaaaggaaaatcaaggcagacagatatttcgaggtgagaatggagttctggtattggttcttaataataatggttgtgactgaatgtttgttcggcgatggcatgccgatcgcggaatgagagattcctcggtggtggaattgttgatcgctgacattcaagcgataacattggtcgatgataatttaggaatgtgggcctgtattttctaacagggattgatttgataggaaaggacattatggtagaggctgaagaacgggtcgtatgtatttgatatcgctctccgaagctgtttcgcgtgggtaactgatctatagaccatgttgcaaaaatctcgactgggtcatcaaccggtatggatgacctaccccaagcctttctatgtactcgatgtagtgacgttgccaataaacaaacagaaattaggttgtagcgtcgatggttaggtatgtaggcagtgaaacgcaagcctcaatcgatgcagtgaagatcgtgctgccccttccttttgaaacttccagtctgttttgattccgttattgagtgttgataccacgtagtcagaccataaaacttgtcatgaaccccatccagaaatatcagtcagatctggatagtcttgccatgcgtcagcctatagaaagtcatcgcgcgcaactgaaatccggcgactaggtggcaactagcccaaataagcaggggtcaagcctaagaacgatgtgcaaataagttgacgcgtccgtattcgttgactggaggctttgaaagtaaacatccgatggttaagcgcagcagggagcgcagcatccctatgaaccgagacgtttctgttcgtagttgataaccatcattctttcttgggacaaggatgtggagagagtaagatgagaacaaaagaattggttgaagtgttcgatccgatagccctccagctccagggctccagttttgggtgggaatagcttcaattcaatggtttatgcggccgggacggttttcaacgctagggattcgaagaaagggatggtttgtagggtaggaatagcttcaatttagcggcgtcgaaagcggtaatgtaattcacaagcgagtgacgcacacaagcgagtgacgcacatcctagcttagagggagggttagtatttaaagataaatattaagctttataaggatctaattaggtaaaaaaggtactaaactagctactaagaagctatttttaattatctctaatttaaaagctttaatttatataaagggatatactttaaagaagttaagtttattaatatagttaatcctattctatatttttattttaattaactaactatataactactttaagactataaaacagccgatattaagtagttataaaaggtaagaggaatatagtagtatataaattagtataatattattttacttataaattttattaaactttagtattaaatagcttttatagctattaaatactaaaagtcgataccttccctttatatataaagaagttaaaggaataaagagcttttaaagctagtaaagcctaattttattagaaatctaactatttagactaactttaaaatactaattatttagaagcttattaaactaagatttaataaagactttacccttaaagattatatatagagggagtatctacctagaagtatttatatatttaattatagttacctacttataatttctggggggggggagccctgagttttatatagcccgcacgttagtaaagccctagttcttagctgtaaaggtagcgaaggccttcttcgctgagcgcgggggggtgcttcagctacttccaccggcgtagtaatcaattaagaagcttcctaaacggagaggccttcttcagaaggtatctacctctgggatctagtatgcttttacttctgcttctcgttggcagcctgtaaatcgcttacttctttcttaagaagtgcggtagattgtatagtaatctagcaggcttttaaaacctggttaatagctgaattaagcgggctcggagggcttcttaatcttatataaagcaatgctttaattgataaagcttacttttataattaaacgtagtttaacggtgtttttaggtcctaatcgctatcccagcttagggggggagttagtgtttaaagacaaatatttagctttaaaaggacccaattaggtaaaaacggtactaaaccggctgctaagaagctatttttgattatctctagtttaaaagctttatttcgtataagggggtatacttcgaggaagttaagtttattaatatagttgatcccaacctatatttttaatttaactagccgactatatacctactttaataccgtaaaacagccgatattaagtagttataaaaggtaagaggaatacagtagtatataaattagtataatattgttttacttataaattttattaaactttagtattaaatagcttctgtggctatcgagtattaaaagccgatatactccctttgtataagaagaagtagttggaataaagagcttttatagctaatgaaggcctattttatctaatatctacctatttagactaactttaaagcgctagtcgctaggaaggtctttaaactatgatttaaagaagaccttacctttgaaaataatatatagagggagggcctaccccgctatatttatatatttaattacagttacctactcgcgatttctaggttataaaagtaatctctaactatagtatttacttctagttataacctttactattatagttaatcctatagtaaaacccgtcttattaaagttataaatattatctagatcgattctatactaaagaatggttttttaaactagattaaaccactctctaataatccttaagtctttatatttcgcatactcgtaattataatatcttaagaattaggaggaaagggtagggtactgtttaataaagtttgtaacccaattttcgccaactaaaaggaccggggttattccacagtattcgaggagaatattcgccatttctcgtaccgaagagggccacggggctgaactgcgagaatccatagagagaatctatttctgaagagattcctcttcaatttctgttaatttatgcgagttggcgcgagaagtcgcgcggtttgtaataccgcggagacggcgacgtaacgtagtttcaggcacgtcgaaccggcgtgctgcctcacgaatagaactgatttcttgactcttaatagcctggatagctaacaagatcctgccttcttgctctattgaattttgagagcttcgagagcgaattggtggcatggtgggtggttgaattaactaagtgctaaaccatagacgcgttttaggtggggtgcgtcactcgcttgtgaattacgttatgtgattcaggcatattcaggcacaatcaggcatccatggatttagagcttgattatgtcatccgatagtcagcatgcatcgagaaagtctctcgtttccctgtcgctctgcacttggggtttagattaaaaagtgagaccaaatgcttcatattatagacgaaactacgaactctttgaatgaaaaccgaaagtagaaccgaaagcgatcgccacgacttgttcagctatgctctgcaaagctagatctagcacggagatttgcaccggaaaagtagagaataaacatgccaatctggggtataagttaacacatggaatgtaccaaattgtcgcataggagacttacaatccctaagatactcaatccagctaacagagtcacccccttctcaattccaaggtcaatgaacatgaatcgagagaagaggatgaacgcaaacgcaacaccagatcgtgagatatcatttccggcaaacagagaagctgcatacttcgggtacgcaagcggcaggtatacagatacacattgcaatataatgaagatagatcctgcatataggacaataccgaaggcgctcacagcccaatggatagttccgttggtagtccaggctaaacggcatgaaaattagtctctgggttcatattaaaccgccgccttgaacggggtgcttctgcttaccgaaaataaaaagtccggccggtggcccgaaagaagcgaatagagcaggggccaggcgatgctcgtgtgcacgttggccgttggcttttagatctggcatgagacgggtatgaagataaacaatatagacaacaattgcaagcccacagccgataataatcgagataaagattagcgcaacatccgtagcatcaaacccatatttggccggataaaccaacggaaacgcttcaaagaaggagtaatagattccataaatgagggatgtatagaaattggcgaatagcacggctgggtctttgaccattatctcgacgggttttatcaggcaatcaaggagcatgtcgcaaaatgattggctgttctgcacaatctcagaccgcgagaaaaggttcgagttcccagtaactttgcgtagtcgccgtgcgcgacggaggaggatattatcggtcgatgtctctggaagacagacggtcataagaacaaggatgggtgcactcagccaaagaatttcccacatcgcccaccgccaactgactaatagttagccactggtatgatgcatgcaatatcgattgactcacccttttttagcgattgaaaagaccgacaaaaccggaccaagagctggtccaccgtacgcagcagcaacccagctggtcaatcctagcggtaggtagatatccgaatactatagtccgatagattgtcagttctagcagaggaatacaccctcttacactaaaaggcattgttgcacgaaccatatctgtcatcgaggcaccaccacttgccagacaagggcttccgaaaaagccctggagaagtcgaagaaccataagtccggtgtagttgtccaccaaagcggtaggaacacacagcatgacaaagatgattaaggaggtaatatatgggatattgcgaccatacaatggaacctcacttaagggcgagaagagcaacggaccaaggccatctgtaggaaccgaagcgttagggcttatcctgcgagagatatggtaggaacatacagcctaatacatataatgccaaacccaatgaagccttcgtttgactgacttggaagtgttccattatctggctgttgggtaattagtcgccatgaaagttttgttgttggattgagagcttacggttcagctggaacgtagattgaggagccagaatagatggcgaacgtgtacaaactgtcaaggcttagaaaaactgttgtgtgagcatagaggtaaaatgcgaggtggtctgtaccatatctgaaaggtaacaaatctcttcttccataacgaccaatttctcgggtttgctggatcgtctggtccgtaccaatcgactatattctttgtctcatctcgcgtgtgtgctccatccgaatttacatccggggggaagtctgaagtcagtgctggggttataatagagttgccgtcgagactttgtttggactcaatctggtattttgtctctgccgacttcgatggaacaaatcccggcttttcttccggataaagtagaatcctattaccggtgatttctcgtaaaagctgtcccagaggtgactcgcgcactgtatccatatcttgcccagagttgataatatatagaatagcgagatggatcaaggaagatggttagctattaaataaaatgagataatgatcgtcctagtgcatatcaatcacatcaaatggtgagtaggtagggtttacaatgttgtacgacgcatgcaagccaccgtcgtcgaggcacatccgggaaattagagtaaacaacccccttgcatcgtctacaaggctcacaaacccacaagtctgcagtgttcggcactgttagaacttatacaatagggactctggattttatgaatagtcttctgaatattgcgagtgatttgatcttatatggaaatacaatctcagtgtgatgaaatcgaatctaaaatacgatgatctttccagatcaaccaataatgtacttcgtgtaacacaccacacctaccacacctcatgcgtgcatacataactatgatgttgaatatttatacaagccaagcaccacctttctcctaatcagctagctcatcgtatgagacgatcccaattgggtcactagcacattgcactataacagccactagatatggactgttttactgtaatgctgtaatgctctgttgtaattcctcctagtattcaggactttcctaccgggaagccgtctaaatcatgacttagttcatcctcctcccagtaactattactatcaaatcgtagagacagccccatggccctagactattcatgtcggatatttcacgcgctaatagccaatatatgcccctaaagcatggcgtacgtgaatctgcatacttggagaaaataattgcaaagaaaactcgaattttgctccaatttgttagctttgttacgttgttaaaacgtttgctcgccccaaaatcaaagcttagcgtgttgtacgcttaaactaccggtggtaaataaaaatcatttcctttcagcaggagaatctcgttgaaaaccccaataagacatctctgagtcgtgccaagtcctttggtctctgccttctcctgggccttcctcaataatcaagtataggtgtaggtctggggaccactggtgccacccggggttgtaacagtcacgggcacggcgccaagcgcgacgtgcggaggcgcaacagcagtgatagtgccgtcatcttcaacggtgaatagggctccagaggtatcgaatgtcactgcggtagcctgagtaaatccggacccggttagggttacgttattacccccaaggcgagatcctgtggtaggactcagcgctgccagagtcggagcgcccaaataagtgaaaggcacggcatcgctaaaagcagcatcagtcacgacggtcacaggagccagtccggccggtccaggaggggaggtcgctgtcagctggttgtctgaaatgactgcttgggccgtagcaggtgtggccccaaacagaacctcatttgtattcgacagacctgcgccgctgatggaaactgcagttcctcctgcagtggaaccaaaggccggggtgatcgaagatataatcggcggagcctcgaaggtgaaggtcagtgaactattggtccctcccgtagaggtcaccgtaattggtactgttccaattgcatgcgaaggtgtagtcacatccacttcagagtcagacacaacatttattgcggtaccagggatggttccgaatagcacactcgtagttcccgtcagaccacttcctgtgatcgcaacctgtgtacctccacttatgagatctgccgacggctccacagctgtgggtgcagggccagcaatgtaagtatactggtctcctgggttgattggactagatccattaggtgttgtaacaaccacatcaaccgtacccgcgacagtcgacgcggggactgtcgcattgagggcagtgcttgacaagacaacgaagaagggcgctgtaacaccaccaaatgtgaccgatgttgtgccagtcaaattcgttccggtcaccgtgacgacattaccgccgctcaatggtccgctgactggggacaaactcgtgacagtcggggttggagtaggattccaagtccaaacattgccagtatcagccgcactcgttccgcccgggttagtgacgaaaacattagttgtaccagttccaggcggagaaacagcattgatcaaagtgcccgaaacaatcgtgtacgatagagccgaagttgtgccgaaagtcacggccgtggcgtttacaaacccagttcctgtcaccgcaaccaacgttccgcctgtcgcagggccgttattgggattcagagatgtgacggtgggtgctgatatcgtagtgtatgtataacccccggtcagagtgctggtattgccagctgcatcactgaccgtgacgtctacagctcccggtgtcacggttgaggggacgaccgctgctaccgtgttgttggaaagtgctaccacgctagtcgcagccgtgccgccgaatgtcacagagttaacaaatcctaagtttgttcctgtcaatgtgaccgtgttccctccagaaatcgacccactggttggtgacagtgaggtgagactcggcaaaggagcaaccacatatgtaccggataatgcctgacactcaagacctttccctttccgttttagtgctcacttcttgccgctttttgatcactgagtaaaaatgagcacgtccctgagtaccctgacttgatcacgggcaattatataattaacgtaatctgctcactgagtatcacctgatcatcccctgagcaccctgatccacttactgatcattatctgagtatcctgatttgctcactgagtgctcactgaatgtacggctgagcggcctgagtaagctatatcactaaaatgcgatacgctaatcctatcacgtgtaaccctttccatttagatcgcctatcaaaaaaggactggcgcagtcaacgtgaccgttcatcctagcggtctcgaccctatccaagtgaaaacctcgcagtggggctattcaattgacccatcattttcccattccagcctatgctcctgggaataccctcggaatacttcgcttaccagcccggcgatcccctaatcgggctttggactactaccagggcgagggcgattggacggatttccttgattagagcccttccctgtatcaagacaactagagtaatcagtgtttagcaggtacgacgatgaactacttctctcgctaatgagcgtgtaagtcgaaggcgtttctgagcgtataatgtcatgtcttttgcgctatttctaagtaggttgtaaaccgaagacaaactatcaacagtaatacctagatgagctcctgcgggctcccaggagctcatcggtattattagggctctaaatgtctatagctatttcgttctaatcctaggaattctaagcctcgcccgtttggcctagcatttctgcctaaagtgatgccattttaaaggggaatatatatgcctagtcacttactccgaaaacaatagttttcatcattcctctgcatccgagttacttaaccaaaaaaaaaaagactgtttttgaatatatcacagtgagttcagcctttatacacacacacacacacaatttattaacgcccggcggctaagccgtaagggcaactatctctgatctactatatatagctctgcaattatatcacggacgtgatcttccacggcgattcgctcgtagttctcgagaccttgttcactgctaattggacggagaccgaaccgtctggcatcctcctcaagcgctatcaagggggtaaacaatcgtgcttgagcttcctcggttggctgcaggtagttgcacacagagctgtatattttctgctgtcgagctgaacaatcggtctataatgatagtcgtgtgggacagtattttccggtgggcggaggtatgctccctgtagttgagcgagacgatgtttcgactctcagcggtcgggaaagtaagctgtggcagaagcgcaggagttctgcaaatgcgttcgtcgattgcgctccctttgctgcttctctcgctcttgggcttgcttctctcgctcttgggcttgcttctctcgctcttcggcctgcaaaaagagtttcttgtaatcggtggggctggtattggccattgggttatcgaaagaaagagaggaattagggataccggtactcgagctagctggcttatcagctgatccggatttcggcgaaagtattgtccgaacgccgttgctgtgagttggttagacgttcagtacaatgggctgaaatttgggacaggcaagggacaatagttccgggcctatggcatgcaacccagaaccgaggttctgtagtatgtctgcgtcaaccacgacccggggacgcagtgctaaaactgtcgcacttggacctgattgtcgatcaaatattgtctctttttggccatctggcgtaactgtacaacctgaggaccgatagtgcatcacaatgctatcaaaaatactaaaggtatcatggatctctttgcaagttcttggaaagacatggcgtgatcccgtgtctgtcaaggatacacatgaagcatacaagatggacggagatgatctgcgcgggacccacatagtgtatatgggttccccggaacgcgaggaagctaccttcttttgcttcctcgcgctacgtcaaaagaaagtagcttccccgcgctacgtcttgtatctagagtcaactatagttgttctcaatattgattgttcatccagagacgctatctatctctatgtatacgtgggaccctcacatctcgcgaaatgaaatgcgggcaataagtgcgggcaagagaagaagaaacgattaacagccaccacgtagtcgagtcagtctgtgataatgagagcgccctttcccgtcccaaccatctttgcgaatcgcacctcggttgactcttgcttcttcaagcccacatccagctgcattgcccaaccacgtcagatgcgcaagtggcctcacagagtttgaaaggcaaaaccctcttcggctcaccatcgatgatgtgcgtctctaggagatttgtgaaatggctcatcacaccacaatagagataactccaatcagtagcggctctgtctctgctcgccttggccttgaacacaacacgctgtacaccaacgtcaatacgagagtttcgtccggcctccaagatgctcccatcaggcatgataggaaactcaataaatccagtatagtcacctccggcattcatgcattcatcagagaagtcaatgttgtcgctattgctgtaaatgtggggatatgcggcctttgcggcagtctgccagtccggttgaccagagcgcgggacgcccctcgcattggagaggaagtatttaattccctgcttcatcgcaccgagaatgtcggcgctgctagcgtactcaaaaccaagtcgggtgtcgcagccgatccattccggtatcttagctgcattggaaggctcgcccgggtctccttgaaagtccggtgcgcatgatgggggaattgcacgctttcgggtaatgggatgagtgctagagcccatatttgggttaatctcgcatatatcttcattggcttcaatgctcgctgcttcgctgaagatgtcgacatcgtctgttattggtcagtatgaacgtggatgaaacatgagaacagattgtcaggtatggcaagtctcataccttgtgctcttccaagtgatacttgcaattcgatttcagcgtagggctcctcaatgccttgaatcatcgagtcaacccggacgttgaaatcgtcctgccaggtggtaaaccatgaagtgaccgcttggaagttttcgggatccgcagcattgatcttatccttcaaatcactgatttgagtggacatggactgcttgagggaagttgctgaggcatgaaccgtagaatacagatccgcgggtaccgtttgcgaggcagtcaaaagtgacaaagcggactcgaaacacggcgtcccttgggccataatggcggacattccgctcgtgactgccgcggcatcttcgacaaggatgggcgtcggattccactcgccattagcgaggccgtccggcccgtcgtagtccatggggagatttgcctgctggccatcggcgctcccaccactgctgctgcttccactatcgctccctccgccgccaccacctccactgctgccggtgctatcggagtcaagatgatgttggtcagtagagcaagcgacgccacaggactggtcacagctttgaatgctgcatcctcctccgcagccataaagaccacaatcatcgattgggtctgtcgagtcgcatccaccaaaaagtttgcaactgtcggtaccacagccgctggtacaggattcagttggactagcgctcgaccaggtaacagaaggaatatttacgctcaatgaaatcgacttcgtggcctggggctggtaagtaacagtgtaaggggcccctgggaagacgggtgccggcgttgcgctgcccgatggaactggggagaagggagcttcgtcgcccgaaagcacaagctccgacgactccggcatgaagctttgaaggggataaaatccagtaggggaggtatcggcaccgatgacaacgggccaaaagggaaccttatcggtgaccagtgatgggacgttgagaatggtagtctttgtgccggtcgaggtgcctgaccttgtccatacagaactgaccatggaagggaactgaatagtcgtcgtcgagcccagtgggaacgggggtaaaatgatcttgcatggtgggatgcattgaacctcgggatccgtgttatcccagatgcccggaggaacatagacctcgccggagctcttactgccggcctcaacacaggcgccttccggacaatacccatggctacacgcaaaattgcaaagaccatggtcctccagcccatcgataggagtggctccggtgcctgtagtgggcggcgctggtaccaagccaccctgggcagtgcaggtgcaaacatgcattgggcagaagccatagttgcacgcaaagctacagaggccggtaagagtacccgatccagtgcctgcaatacatgcaggaggtgcgaagtctgagacggtggggataaccagagggacttgctcggtcccacaagcggagctcggacaatatcccaagttgcaattgaatgcgcagaggccagaataactggcatcctcgccggcgatgggatatccgatgacgcccgtggaattgggagccgccaggggcttgcccatttgccggcacgtacatgctgtcactgggcagtagccataggagcaagcgaagtcacagagaccagcgaagttgtatgcaccggtcccgttgatacaggcctgctccgagatcgacaacggcggctttgcggaaacagcggcgggggatgttgcactcccaacccaagcgttaaagagcccatctgtacaagcggacgagatggctttgccggttacttgggcaagctgagttccatcgcgggagatagtcacgataacctctcctgttcccgtaaaaggaacactgccatgataaattccaatttttccatccggagcccaggtcctggtgcacaatgtcagtcatatcttttggaatgtttaaaattgaattgagatgatctttaccatgagccttcctgcacgacgcctccgatgctgactgtcaccgttgcaggctcgaccagaagagcagagtagaacacgcggtcttgcacaatctgactaggggcaaattccatctgcagttggttggcagtgttccctgtggtgccactatcgcaggctgtaccaggggagagacgataccaggtgacgacgttttcttcggtcaccgttgccgttccttctgtgtacaagtcgatcaaaaatggcaaattcaatcgccaaccatcatgcggcatgtccttggcaaagttactgggggccttcccaatcgtgaaggcctccatggcatagtcgtagaggggtccaatatagtgagactcgccatagtcattccctggtaatttttagataaggccaaggttgtactccaaggtttcttgaacttacaagaaataatttccacgaattcaggctgattgtagagaacctcgacccagcgatcgtaccatagatcatcgcccctccaaagccagttcttgtcataaccgggcagattagtgaagaaccagggcgaaacagccatcatatatggctttgatccagactcgtttagatactgataataagaggcatcggtataggtatccatatcttgtgggccccacggccaacctgcccaactgaagagagcatctgccacgccaccacccaattgcgaagctggcttggcaccaatggaagaccaatcagggacgaaaaagacattgtactgttgcttcagatcgatccagtcctctgcatgcgcagggccctcgaatgtggacacaatatattgccctttgtacaggtaatacgcagtcgatgccgtgtattgctctaggagcgcggccacgtcacctgctttccacggaccgttcccggcgtagtcaaaggaaaagaacaatgagaaatgcttgtcgtgggcagcctggaaagcagttggcagaatttcagcaactctggagtcaacagccatgttcagcgcaaacgcattaatgtgagcgtctagggctgcttggatgtctgtttgccagtcggtcaccgtgtagttttccgcgttcatcagctgtgattcatgtcagcttcttgccattacgtatagtaggaggagataggggctgtgatataccatgaagtgcgcgaaaacggctgcagcttggacttgacagtgccctaggagggccactgccagcaaagaagatagtctcatactgcgatacctctgcagagaggaacaattgttcgactatatcagaaagacagcccactgtcggttggacgggggagcaatgggtttttatacataattcggtcgcattttcctagtcaactccgtgctaacttccgtcttatccgcggatactgcttattacgagaaacaaacatgaaaatctgcctatttaagtaccaatttccggtattcctcattgtttaggatggtaccgaatgaaatacaggtccagtggtagactagattgttagtgcctggtagtgccatggaattatctagatgaaatggaaggccagatgaaaaatattgtactttgccacacatcaattaagctaatcgctaccctagtctcaggtgtatttctctcaaagtaatgataagatgccagggaattttatccttaaaccattagttaaaaggccatcttaataaacaggtagtatggcaaattctcattttcgaatgctgttgagaagtcataagtacaggctatgtgcaatagcacgccacatagaaaatttcgccaaaattcccctcttggatagcctaggtagcgttgcggagattggcatacttagcttcgcctcgggaggccgtgagactctagccggtggcgttggagctccaaccgagccctcgagcctcgaaacccttcaggcttagtctgtcacgtgcctatatatttgaaaacaacaaatgtagcattgagcatcggtatgtatcttgctgattagggcatagacacggagtttcattaataagataatcaagtatcttgtttgggttatcgctttttggtgaccactactgtgttagtgtccctcatttcctcaattctcgctctactctcgactagtgtaagtagaggaatactggaccactaattcagtagttcagggcaaatggttcacttccatatacagtttagtctcggagtcctcttcccgactttctttagtgtcgcccgaagtggagttctataaattactatggattagagctaggctacgctggtcagtatactccgatcgaggtaggatggttttctaattcataaatcatacccatgcatatggagaatgtcgcgagtgcgcattggccgataatgccctttttacatattccttttttttttctcgctgatagcacttaagatctctggggcaaatgtcccaccttggagaacacagcatttctccaaaagaggttttgaccatttcagggcccgcgctctcctgaaaccgcgtgtagattgtaagatttctatcagaacgcgctagccaggcgcacctgcagtacagtgagtctcgaaactgtggtgcatcctgtgaatataggtcgaacagcggtgtttggccctcgtatattcagtatagatagagagctttcctgaaaacccaccattcccgtcgcttcatatacaataggcgttggctgaaatatcctgtgtcaagtatttgtgatgggggccagcttggcaggtgtccggattaaccgtgtgtccggttaaaagttagacttgtacggtgaacttggatccactttcagaattggtcactagcgtgaaccatttaaaaaggccgaatgatacagtccctgactccttcatctgcaacacctgttcaaaaactggcgtccaacgttgccatccatgagagacgactacactgagtgggaacgcttctcccatccggacccggacgaggaagaccctccgactctggacgaagttcaaaccctgcgagaatttgccgagaccttcggcacagccaatgccattgcagcagaggatgctgctcgccaactaatgtcgctcgtcgacgagggccgcgtggtcgaggagcgccagaacaacgtcgtggacaaaggcgaacgtgtctcctggttattatgggatgctgctatcgacatgacgcgctaccagcctgctattctcaagttaattgaggcgatccgcgcgctgcctcagctggaacgaaccgaggagcagatccgcaccggctgtttcgaggaccgactagaaacctggaggtccttggaggcattcgattacatttggtcggagacatactcccgtgagtggccctttttttttcttctcccgcccctaacagaccaacgctgtgcagtccggtttctttgctcccgtggcataacggcttgaaatttcggagatatccgcctgcacatcctcctgcccttcatagagttcctcctaggcagctgatctcatgtcacgaagtgtgggccctatactaatccttttcatccaaggctgttgggagatgagatacggcccatatccctattacgggtggactgaattccacagcgccaacgctttttatgcgcactttcttgccgcttatcctcccgaatctcccgatctcagggagttaaccgtggcattgcgactgatcgtattcgccctcgagcaggatccgtggacccatgcccaacaacctccgccgcagtggcaaggccaccgctatcgggacactggtcgccctactgattatatgcaaatgctgaatgtgagtgggaatgaaaggccatgatggcatttgtgatgattgacttgcatattttaggctgatgtgcacgctatggttccattttttgagattgccgggcacattatcttcgggtttgtggggaaaagagacctttctctcctcgaaaaattaaaaaagagggattccaatctatggcacggagactcattgttctcattggaaagatgggaattttggaaaacgcggttgcgatggataagtgagcaagatgagctgatggaaagaacgcgagcggacgcccgaaagattgtgcaactcatgcaaggaatcgagcaacagaatcgagagatacgcttggggagtcaagattagcataaagataccagaaataaggacttccttcgtcgtctattctgatcagctcatcggcccacttcatctgaataattagttaacgtaattcactagtgagttggccacacccccgagttggccaccccacctaacctgtcaattttaaaggccattgattcgtcccaaccgtttattattacccgatcagcgttagccagaggatccgagctagcatcaaaattagccatagccatgcgtgccgaggtttccgcgctaggcaggggttgaattccaaatccattagcgcaatcaatagtataacccccgtatctcttgttcacagcccttaagactggaaggcgtgatggatgaagtcagtatatcagtggtagatccagaagatcatgtcacatggactgtgcgctatgcatgccatgggacgtaagaagctcacgtcccgtcccgacaagggccggggtgcgccctcgagcaggatccgtggacccatgcccaacaacctccgccgcagtggcaaggccaccgctatcgggacactggtcgccctactgattatatgcaaatgctgaatgtgagtgggaatgaaaggccatgatggcatttgtgatgattgacttgcatattttaggctgatgtgcacgctatggttccattttttgagattgccgggcacattatcttcgggtttgtggggaaaagagacctttctctcctcgaaaaattaaaaaagagggattccaatctatggcacggagactcattgttctcattggaaagatgggaattttggaaaacgcggttgcgatggataagtgagcaagatgagctgatggaaagaacgcgagcggacgcccgaaagattgtgcaactcatgcaaggaatcgagcaacagaatcgagagatacgcttggggagtcaagattagcataaagataccagaaataaggacttccttcgtcgtctattctgatcagctcatcggcccacttcatctgaataattagttaacgtaattcactagtgagttggccacacccccgagttggccaccccacctaacctgtcaattttaaaggccattgattcgtcccaaccgtttattattacccgatcagcgttagccagaggatccgagctagcatcaaaattagccatagccatgcgtgccgaggtttccgcgctaggcaggggttggattccaaatccattagcgcaatcaatagtataacccccgtttctcttgctcacagcccttaaggctggaaggcgtgattgttgaagtcagtatatcagtggtagatccaggagatcatgtcgcatggactgtgcgctatgcatgccatgggacgtaagaagctcacgttccgtgccgacaggggccgggctgcggcccggtttcgatcgctttgttcttggcgcagtgaggaactagtccaaatgtggttaggaaaaagtggtttaaaaaaaggataataaaaagaataatacctaacccaggaagtatcgacgtgccaatatgcatcaacccaatcttgcaagtgtcctttacttccccagtgccattctaatctgacttcttatgtggaggataatccacgaacagcaccctgggaactgaaggctacctggcctgatgaaaacagcggtgttcaatccagtctgaaccacggtcgcatgcagatcacccggcttatacgcaattggaaaagatacgtttagagtgcaaaaagcgttgcgatttgcccggggaaagctcaatgtgctccaccatactgcggatcgggccctggtttggtttccggagggttcccctgaatccgatggccaaaattgcgtcaattgttctatatcgggcagggacatactgagacggagtacattctgaaaatcctatttccttcaatcaactgagcaatttcaaattaccatattcatattattatcgcataacaggcggctatagtctcacctagtagcatccctcaatcgagataacctccacacaagctctccaacgtcccgccattggcttcaaaaggacgatttgcggatcttccaggtcggcgcaaagtgctgatcaatgaccggctctgatcggctcataaatctgcccaagcacaatggcagtagttcagcgagatcgtgacacttggactacgcgatgcctaatgccccgtgagccagacactagactcaacctagcttaagtcgaaaagcctaggccatcggggttacgagggttcccctgaatccggcggccaagattgcgtcaattgttctatgtcgggcagggacatactgagacgacggagtacattctggaaatcccattttcttcaatcaactgagcaatttcaaattaccatattcatatcattatcgcataacaggcggctatagtctcacctagtagcatccctcaatcgagatgactccacacaagctctccaacatcccgccattggcctcaaaaggaggatttgcggatcttccaggccggcacaaagtcctgtccaatgaccggctctgatcggctcataaatctgcccaagcgcaatggcggtagttcagcgagatcgtgacacatggactacgcgccatgcctaatgctccgtgagccagacactagactcaacctagcttaagtcgaaaagccaggcgatcgggattacgtatgcacaacctgataaagtgtcagaataatcacatagtcgccgttttgcgaacttgtcgatacttcaaacgaagcactagtcaaaaataagtactataaacgagtgtattatggatgagggggaatttgattttcagcctaccgtcggactagcgtccaacaatgtcggctaatggcaggcatctctacagcttgaaacacaagacacgaaaccgatcttccgcgctaatacatcctaattcggagggccaccataatctccgccaaagggccgttggccggatgagattaaatagagaattgtataagcttgatctgcgcgacctaagggaagagagtatgaccgtgcaatctccggtctggtatatcgaatactagactatacctatctaggtggcgttatatatactatataggtcacagactacatagatgatgatatttgctgattcatgccctctagctagataaacaaccccgtaatacctccataatagtacacttcctctataaaccaactcaacttctagtatcttcaaaactagggtatatattggctagctgtcaggagcggttggtggttggcttgtgttagcgcttgttgattggtcaacggaagtgaatagctttaaagtgagttagtactaagcgaacccatctggccgttatacaccggctaggaaggttgtagtatatcagaagcagggaagccagtaaatgtaagcttatttttctctgcggttttctctacctctatcttcttctccagctagctctacatatattaaaaattaccgctgacctccagtagtatgggtaacagattattactagctgtattaccaacctatatagcgttgagttattattattttagactagatatttggaacttaagtatttaaatcctagccagattctggtcattagtatcactcagctagcaaatctttgccatagcttaggtttttcctacctctagtcactgtactaattataggagctcatcccgctctctattagcgtccttaaaaccctataagtatcgtcgataaataacactctagtacttttgtttagaggtctttactactagtaaagggctttagattctacactcgggtaagtccttactttaacgagatcagtaattaccggacgtaccaatagtatatagagggatataccttaggtacctggcagagggccactataaccagtagtaggacagtattgagtccgtttcagagcagtatctgactcggaactgccataaccagtatcagctagggcttcggatatcgtcctacaggaaggtatatcgagcgttagcacaccgaaaggggtgtctttataagatagagtaagtttagcattaaccgttcaggtagacaatgttagctcttataggtctccggcgtatacgctagtagctagaacgttttagagttagtcccctgccgcttaatctacaccgtaggattataaggttagcagatcggatacctagtcattagtctataacataataaccggctcgcaataatagttatcctgtaatttctacactatggttacattaagggtcggtagtcagccgttaaccattacttaaccagtaggtttctcaataataaacttactttattatctataattctacagttaggttttaaacattatcacgacagcgtactctttctattagtaggtagcacttattcacatatccaataaacattatcgttagaatcagatcccagtctcatttaaactacctaagctttactagaccatgcaatttcgctaagtacccaaccaccgctatctgtatatattagtaatctacctagtcttttcggttactctagacggtatactttagcccagacttcctgccgctaagtactcgaaaagctctattagacagcgcgtatcgcgctaagtaggaactggtagtggttaatttccggtttactcactcctcccgatatatcaagcagtctatcaataatcgccaatctatagtagggtatacgccataagatatttgcggcaacagtagtggatcatacgccgatctacgttcgtaaaaaggtaggttttaggtaatctgtgaataaagagtctgattcattggacctcataagctactctatatttgaaccagtcgcgactcaatagtgccgccacttaaccagatatcgagaatatattatgggttaatatagatttatccctgttatataatttccgtgttcctattattagaaattatataccggggtacgcgatttggctcagtctcaaccgtatggcatgcgttaagtctgtcacatgcaatactggccctgtcggccttcccttacgggtttagcatttatcgttctttccgttatcgcaaaggccaggttcccttagtctttaagctggctgtgtttactcgccgtcagctaagggtatgctatcagtttggcgtacatagcggtttctctgtgaaaatgtgaaaacgttttacgagtcttgggttaacagtatatactactccaatcttctttaccatttccgtcctagctggtaaataggcatattagggttagagagcacgaaaagtcttactatagtcataggcgggaggtatataaggcaccaggtgatttcatcattacattacacaatatagacctcgggttctccctaccgtttcaaacttggcccagttaaccgtatatagtctaaaagagttcaaacagaccgtttaagacccgtaagatataagcccattcgaagtccaaggaaactctagttagagactaaatattaatatagagctatatatataagcctaacctccgttactcgagtatgcttcctagtgcttccgtcagacctatctcctcgtaactccgattaagatacaacttagtgcctatctttattctaatagaatggattctatagtaggcttactagacccctttcaagctccatctaactctataataggaatatcttcgactcctcgcgaggctcaacagtcgggcagtccaggtagaacgagcctagaccaaacttgaacaagaattaagcgcctctagggctaccgagaatcaagcgatagaggagctgggccatatatccagattagccgatattttctttaaactcagtcaaattctaggcagcgtagtagattattagctaaaggagtgtggaactaaagaacccagctaagagccagagttaataaaggtcatacttgatatcttattaaaacagttagaagtacaggagttagctaatagcggtagaaattccgataatacctcgaaagcggtgatataaaggcagcggtatagtacagctaagttatagctaaaccagagcttaccgtacatcgttccttatttatatacattagttattacttataaaatgactgggtttatttacagcttagtcgtatgtagaaccgttataatattcttttatctactttactatagccgttcaaatggattcgtttctacatctgcctatatatatgccgttatattcttagttcagtttagaatacctctttccttaaagctactacaattatatttcaatttatactaattatagaaactaacagattttctgttatacttagaagctaacgcgagagctttaatatattctagaagacaacccttctaattatactattactgaatcgctacccccgacttaatctactactagactagaaaatgtattcaaataggaccacattcgataatcggtagctctatcgctagaattaatttctaaggaattctagaagtagaagatacaaccagatagctctaagctcgatatataagtctaatatagatatctctcttatattaatactaaatcatatagcagagggctattattaagatagtaaaggggctactccttaataaactaatatatatactagttattagtaggaagttggaatataggacaaaaaggcaagataggtatagcagagtggggggtatcatggtttattttcattcgtagtcagcggtcctactagaagataataaggcattattaggctaaatggttataataaaaagttctattaacgtaccggccgctactattcatactatatagggagtatatttattgagagttattatcgatttcttatagcatataaaaaccggtaatcaaatggtatatactaactgtttgtacctactatataggatatactagtcggccagccgtttaccggtaaagcagactagtggtacccatcttactgagtttaggtagcttcctctgtttaactggcctaggcgtataactagtccatccatctttaggcgtactttttagttcagggaatgacgcctgcattcagcgcatagcatataccttgcggcttttaagagtcctattacaggtgaataaccggtagggagatcttagaacatcttgagacatatcgctccatctatccgtgaatccttagacacaggattttaataacaggctccattatcttcaacccatcggcactttaaataatatatgggatcgccaataatttggccgaggagtgactgaagatagtcagagctccagtacatatttgactgctgatttgcaactgtcggcaagaatgcggtccatcaaggggcaatgtacccgccgaacaatttcctattgtagtagcacatctgctatgtagggctcaaatgcaggagagactctgcctcccacccaagaggatggagcttgaacgtgggattataacccttaaacagtgatctcatcatctcaatttggggttcatcggaagcaggcacagagcatgacttcagaatgtcaatacagtacacggcaagctagcaccttagtttccatactcacatgcgtacgcttggctaagttgctaccatcattacaggagggtgccgggtattattccgcctttgatcggtatccgcgaatggttcgaagaagagagagcaagtattatcgttttatgactctatacatttttattgccgggctcgtgagattgaagagtagttgtacaccgcagatttctacataccggcttagacttttatgcagaggttttcgcaatgacaacatttcccagctggtgcaatcaacttttctcatcgctagaaagtggaccgcctaaggcgcaaaatagtgcgcgctggggtttgtttgctaaatcgttctataggagagtgctctcggatgcattgaggaaatgctgtatatgaccaagatttacatctaaacgctcctcgattagccttcaacgctcgctaaagtcttaatcactcttaaccagctcttcttaaccactcttcttaaccgctcttcttaaccactcttcttaaccactcttcttaaccactcctcttaaccactcatcttaaccacccttcttaaccactctttactacagccaaaataaagagaattgctaactcgcgatatttggttttctagaatacctaagcaaatggtcgccgtttttgtctataatgataatggtatttctaagtttataacccataggacctatccttggcaagagaccaactatacaggtatatctgttttattctttaaggttaccagaaggaccgcgtgacctctaatcgccaaagccataggtatatatagacttgatatatagatagagcgaaaaatagagtaattatcattccctctaaactaaaaggaacttactaactactagtatcgtagatactttattcaagtaggaccatacctatatagtaggagttttcatttagaagtagaaagcaggaccttaagagtaatagatatcattaagacagtaaaccctctatataatagccttacccaccatatagtatctagaaaatctaaacttataccgataaggccggtctagaaccctataaaaccattaagtagtcgtatagttcgataattacctatcccctaaaagctaatataaaaggccaaagcgatttagtgccttaagtaccatatacttatactataggagtaatttagtgattactatatagcagtgtatcctttctagcttaggtagtattagcacaaccctatagcactactaatcccctagactagggataagctctttaactctattcttagtagctattactagagaataacgagcagtaggtaataggccatagtgaaaaatctactactacagtattatattatacccagagaacccaatcgctatatatatacttaaagagtaatatagtattaattaaaatatctttctataaagtagctaggccctaaaagttttatagataaactataatatacctatagttacattccttagtaatagtatataccatttagctattcgaatcttttagtcgcttttttatactatacctattagctaatagctatataaccttataatacctactagctatagcctattagaaagaagttctcccctagttgtctactatatttatatttatattaggatattctaataatattttgataattttaaccctacctagagctaatataaatattagtatagtaaaggaaaagtaatagttttagttattaattagcaaagatttttcggaactaactaggagatagataatatcgatatactctataattattataaccttaagtagtaatattcctaatagacttatttagttaatattggctaaattctataagagaaatttaaccgctataaactatcctatataatatattaactagagtagtagagatatattagtaaattaagggctcttataaagccctagctattagaagaggactttaattaagtctaaggagctattcgcaatagcctttactaaaggtatctagcctagcttatcggcacaattgaaatctagatttatttactataagaggaatttaactaattttatattagaattacttactatatactatattatagtatatctattcttatcttagtaattaaggttaatatatagacttaaaagtaaggctttaataataagcagcctttttttaatagggaggaaacggctatatcctttaataactagaagtaacagagtttcctatcgatagttaaaatagttaacattaactcaaggattttatataagtatttagattactctatagtcgctaatctctattactaggtatagtggtatttagctataatagtcgtagatattaatatttattcacttattagataaaagaagttagaagatataagtttagcgataggttagtgtaattaaaataggtgtaatcctatctagtgattagttattaagattaatattcactatattaaggagccgttcgataatactaacgcttctatatagaatagcgatcgagaaagtactttctcctaaagtattatactatataatatttactaaataatagcttaagagtaaactaatagcttctaagtaccgtaactttatagctaatataagcggtataaggctagaaaacttttagttaatatctgccttttcctaacctagaaagtattagataatacctaagcttctatatttaattgcctaataaattagcgggatatcttaaaagtctatataattaataaggctcttactaaagacgatataggatttccaagatataagatatagacttcgaaggtctttcttatcgatagatttaccaatctatagaagtagttctagtagaagtcctaaaagcggtatctcagcagattatatgaatgtataggtaacgactacctatacagataataataaaaggagggctcagagtaataatttagagatcaagtttgctactacaagtggttggcggaggagcttaggaggcgcatttctttatggtactggcttctatttaactatttttgagggcatattattgcagccagtacactaaataacgatatcaccgacacagagttacctaaaagtattgagttaccagctcctaggattatactacttgctcctgggatcctgcgactggtttctaggagccctaagaatcccgggagacagctatagtgttcccaggaaacactcaccgattcctaggagttatgcatcgtacctgagactctaatataacggacatacgaaaaccgagtcacctaactcctacgatctctgtttcttgtctcagggccaagtggcgccatcgtgaccaacatacaaaggtcaagcgcctcgccagccatattacaacctcctccaacccacaagtgtaccatcttccagttacatccaatattagcatttctcgagcattcaactttgctctaatcttttaacggctcccacttccacggattctatcctatcattttcgttcaagaaacaaacaatgggccaatactggctagtggtttgcccgtccaatcgcgagtacacaacacagtcatttggagggaagttatcagagttgctcttttcgtcgtggtccaacatactacgtgacctgattgaaaacgagtgggctggcactcagctcatctgtattggggattacttaaatccagacgacctccctgccacgattcaacaagacaagttccacctgagttccgctgagagcggtgcaacatccgagcccctccgctacgatgtcgttaagaaaacgtttggattttggtcttacgaagaagagaaagcagcgactctcacggtcatggaaaaaccttccaatcccaaaagtcgagtcctgaggaacttaactaccggtaaatatttctttgaggacgcgttgccatttagaatcaccattggccacatagttctgatgagtatctgttggtcgtcggaaagttcaataggcattacgggcggagcatatctggccaagggagtctgggctggccacaagttcgacattgtagatgccgacatggtggaacatatgaacagacaatgggaagatgtcaccgaggacgtcctcgatgaggttcaggctctgtggccgagcgatttcggacataactcggaaactgaatggagagtttaacacgtcctgggcaagaagctatgaaatcacttgacgtaaaagatatccggggatataatcctaggctaccaaacaaattgccaataagaatatctttggacacccttcccgtgatactgtacgaacaggtgtggcctgtgcgaccttcaaatccctgagtttctctaagcacaacgcttcaatcgattgcctactcgaatttactcgtcataactagccgagggaatgtatggaaaattattattcgaacgataagagtagaagttcattcagtagtaaggctttaaatttagacaagaagtttcaattcgcctggatagagtgctcgactgagtgcacctttaacttgcttcatagggtcatgtttcacagagagtaacccaaccagcaataatccctgcgctgaattcgtctgttccgaattctggagtattaaccccaccttcaggtaggacaagaaggccgtctccgggcacccagtgaggttcctgggtactaataagttcctggggccgcacagtagcctcctggcagtgcatgttatcatcctaggacgagcaagtttctacgtaaccacgttaaattagtggtcgacccacccttttttcaaggattttgtccgcagaccaactatagaatttgcaattccgttttaaacaagtgactgaagttgaaggttgctttcgatatgagtgctatgaggtttgatctaggcaacgttttctttataaggctattttatactcatatatataacatcattgagaagttacaaggatgattgaaatagcagatctcagaagaaatacatatcaaaacatacatggtacgttacattacctcttcataattacttactaagttctcttcttcatctatggcggtgcggaccatataactgtaatgtaactatttgtttcattgtaacaagctggctgtactaagttttcgcaagaacagccaagagttgctcgtgttattagccccaaacggtcttctttgcccagtaaagctatgttccggatagatctaatgaaatgccactggaaataaatcgattataatataaaggtatatccgcgagcccacctaaaaagacacttatcatgcttcagatttactacgcttaaagtatagggttttgccccttgagtttaatataccaaatttactccttatagacaagtatagtttagcaggtatctaagcgatccatttattaaataatcccttattctcgcacagccaaagagttccaatagtgcgataaggagtctagggtttaaaggtcggcagagggtcggactaccagctgatagtaaatttatacagataaagtaaaattccagtatatataaatattattaactaaagaaataatttagttaccgttccaattagcccaagatctagtatatctctaagaaggcttcaattccatccatacctatcgcagtaacgccatattaatatccgcgaaataaggcctaatctatcttagggtcaaattcttcctctgtaggtcatataacttctatttattctttgcgttaagcctcttaggggggttatagctatctagactacctaaataatactaaagcgactgggtttgtgccttagctctagtaaggggtctataagggctactaggagggacttagttattataaggcagattttacttactatcttcctataaaggtagattactatcacagctaaattctatggtaatagcttagtcataagtaggtaaagaggtaagatattcttacaaatttttcctctccttattagctttagtaatagtatagtatctagaaggctaactagtaaagcttagagtaggaggttgcggctattttatactactaatagaagttaccttatattctttatatagggaaataagtgattctagctaaatagtagcttaatcataagattggtgtatattatcactattaaatttaggcagctcgaggatttaaggattaatagccttaaggctaagagttattagccctaagctaagtaaggaaactaactctaagaagtatggttctactaagttactcctattactaatactatatttattataaatactttatcctaagtattattctagattccctttaatagataggagtaaggctaggataggaaaagaagacccttctagtatatagtccttatacttataacttagatataagtaatagtaaaatcgagatttcttagaatatcccttttatagacctattaaagatatttaggcttctaacttataagtacactttctcttactaggtagctttagattttactatatagtttccttaagcctatatatattatataagtaaagttagaggttatacttattatagaagctttaggaatatctatatattagctttatctaataatacctaattttagctaagtactgtcttttaatatattcccttagattattactttatagctagtattataaatacttttctatagagagatcggggtcctataaatagaaggggtagtagctaagacagataatagtataacgatagataattactttatagtattaggctttctaggactagagataggtattataataatcccgctattaacttaataaatactagtctatatatttatagtaaaactgtatctctaactctaatatttaaaggctaaatactttcttataccgaatatatctataaatataagcacttctattatattttcttaggctagtagagttagtatccactaggttattattaggttagggagcttaccttataatattaatttaataaccttttataggatagaggccttatactaggcttttatttaggagatatactatattaaaatcacagagatactatatctatagatcttcgataaagagaagttttttattaaaggaaagctctttagtagaggatatagctgttataattcgtataaccttaggtataattagtatttaagtatatatataaatattattttccgaatatattagctcttcttttctttaattaataactttccggtctcttttctcctatacctactgaatttaatattacttaagtttaaaaaggcgatattaaataagtgcctttctatattctaacttcttattcttaaggtaattcttattatagttctatataaataaatcgatctaggctcttatttctactatatctagtttttctaaaatactctctttaatctctactagtaacttacctagtaagctatatttataatattaaatataaccttagaagtactcgatatagttagactagtcttccttatctagaatagctcctactatatctatagaagaatagtaggcttaataatactttagaaaagtatttagcccctaatatactagtatctaactaataggtatagagccgtttctctctataataaaacttagtattaagatctctcccttatatctattatatttatatagtatagggggcttactttcgacttttttcctaaggttttattatatataatagattattactaatttactaaagtaccctatagtagtaaaaatttgatataggtaagaacaaaatttttattttattagaggtatctcctaaggcccgtccactataatatatctaagaactagtttatccaagtattcttccttctattataaccgaatcttactatttaaaagattaaactatactagattatctatagtatctaccctataaatagtattatatactaatataagggagagaagaatatagcctaatataaattgcggcctatttctatcctaaatactaattctaaatctagaagtactaattagtaaagtcctatatatttaataaatatactactatatccttctaacttatactatatattttttatattaataatttttaagctatttctaatctaccttctaacctactgcctaataacctatagataaaggaaatagaactaacttaatatactagaataaagattaatattatataatatcgctagagtaaagataccttactttatatcgaagacctcttttatatttatccttactagagggtataaaagctctaactcttactctagtaaagagatacagctagagagtaaataagataataactttaagtagtcctagaataaatgtttagtagttagtctactataaagataagactattcttaaaaaatcttactttataaagttaagtttctctttcttttaacctataacgatactatctatagttaaatttttttaatctactatatctaggtaagtttaagataatcttagagaggaagttataaataaaccaactatttttatttcctttcgattatctaggataattttagttcttataaattatttaaatctactaaagaatttctcggtatatatacttacagttcttactgtaggtagactattatcatttagtcgcccttaaatagaatttacgtactagtaaatatatactttaattatcttatatattagagtaggagaactaagggaagttttataatatttatacctattctctagatctatagtaaacctaaaggaaggttagaatatataaataggaaaggattactacttagatactatataacttactcgagctaaaggtttatagtttctcagtataattcgttagttttagggagccttttatctttctcctaaattaagtcctcctctttataggttctaggggtataaccattcttttcctactatagatagtacctctctttcacaagtttatcgcacttagtaaaaaaatcctttcggcctataattaatataaaagacgcttagatagaagatttgttaattattatatactaataccactatatggtttacttttatatctaagatcttaagctcgagccgctctaaagaagaaagatataagtaatattataaaatagataggttctctactccgtcctataccctttagtcatgatatatctccttgataagatatagtactccaaaaattgagggtagtaataatgctattaacgaactaactattatagtatagataaccctataggggctaatcccttctaggtatagtctgcggtaggctgagtgcatcagtattactcactgattagatactgagtatcactgagtaatcagggagcacctaatgagcacttactgagcacttactgagcatcagtcattctgtacgtgactgatctgagcatgatcactgatctgagcctgtactgacgtctactcagtgagcctgagcctaagcaccctcataaaagcggcggcagatcaaataggaaatccccatacgccagggaaaatccggtacgtataggtgcatacgtgaagttgacaattgaagtgctggtaccattgggggtggtaacgctcactcgtacggtgccggctgtgttagctggcactacgacggagacagttgttgcggtggacgaagtgggaacggcggtcacagtcccaaatgtgacggtggtggctccagcaagattggttcctgaaattatcgctgttataccaccggtagtcggccccgaagtggggttgatcctggagattgtaggcaaggacatttcgtgtcgctagtatcggtgctgggtttcaaagattgattgttataaatcactgtttgttcgacttgatcagttttcaaacctggagaaggagttgccgtgctttaagtatggctgttctcagcccaagtcgcattattgaggccattgtcacaagatatggcgtcgttcgatagtcacaaggtagcgtcaattgtttgtggtcatatgcattcttgacgatcctcaaggttgcttgaggtgtgtgcaaggtggttcaagtgttgatcaggtggaggtattcagagagatgtgggttccgcagcatcgactattccatctaggcccattcgacttgtcttggtatgttggtcgaatggtgcacagaatagaaagtgttatgtaattgtttgccactttgaggtcaagaattgtttgatatcactattggtacggagatttgcgtagcggacatcaatgaggcgtatgcgtagtggtataggtgcctgccatgcaaaaaaaaaaccccttttttaggtagtattgatgcttgaatgcctgaattaggtactattacagaggccttgatgggctaggtctgttagttgatcctctcaaatatgaaaatgaaacttttaatactatataaattcttgtatcacctggcaagttttaatatagactaggggccgggcctagttaatccgtaccgaaaatagagtaaacaacccaaaaagtggtgatacataaatctgtatggcgtcaaaagcttcattttgacatatgcggtgtaagacgcgggcttggttctagcgataatcaggcattcaggcatcaatactacctaaaacaggcacctatagctctctctctctcgggcacggacaccaccacagccacacgatatcttgtgatctttccccatgtttaaccccaggatggtcaatattccccgttcattttgtcttattgtccgcttttctggattgtgtatacgcactaatgtgttgtgactctgaagtcttttcaactgcttggtctcagagagattggtgaaactgctatcccaaaaataccccgatatacctcctggtctagtcgacctgttttccaagcgaatgaccgcgccaaaaggtcatttttacctttcgggatcatttctcctcccgattgaagagcaaatacagttcttgtcctagttgtttgaaggtaccttgtatcaatgcctccacacgccctccagtataaataacggatcagtatcaaaggatatctcaagagacgaagaaacccacgtaatcacaagcgcaggcacgaatgtagtcgatgcgaaacatcttgttcctcaagaaaatgatgaaaggattaccatagtccagaagaagaagcttagagaggagaaatatcttggttgggcggaagtgaacaaacgattcagtcagctggacactgcaaggttacatagtgttagtacgatgtttcacggtgtctatataagcttagatttcgatacttttggcgaaattatagttcagtcttcgatctttcttttgacccgtagcattctagatcttccacatgttcaagttatatatcttgtaatagtaatttattttctttattatatgacccataaaatcaatcgccctaaagtgattcgctgaacttatttagccgaaattagcctcagaaaatctccttgatagccaaaaaaatacgagatttagacctacttgaaggtagcttctcaagtctactttcgcttctattgcgatttatgccgagatctgcttaagttagtgaaaccagcgcctatgaatctaatctttagagtgctgtgtcacttcaaggttacatagtgttagtccgacatttcacgatgatgtggttttgaatagtaatagtgtaacgtggtggtactataaatccataaaaggacatcaaccgtcaagcaaaatcttggtcccagatctagttgtcttgtcgttggctaccttcgtgtattccaatgcgtctggttattcttaccatcctgtgtgctgtagcaaaagctgccttttctacagcacctaaagacaatctcaatgccctgcctaccggattatctgatagtgcaccatccggctcttcccctggccaatttgatggaatagatatccaaatcgacacaccaaaattcaatttatcaagcgatgacctcctggttcagcttgccagagactcgaatgaagttagcggagattctgaccctaacttcgaggcaacccagttctatatgtgctgtcagcaaaccaatacctcggccgtcatcgataactactatccaccgtatgcgtgtatattcggacctagcacgggtgtatgtcctcaagtcaattcttcatttccatttccatggctgtgcactctccctgagtggtgggttggtagctttgtgagtatataccatacactatatcagcacatcatgataacgcgtctccctgacaattctacgcagaactgttcataccagccttagctgaccttgatactacacccatattgactatcatgtgcatggtcgaaccgagacataagtggaacattctgtcatccgtgatgtcttggttatttacaatgcacagtctgccatcgaagctgctaaatatatgtcgaccagcaagccccacttctatacagtcatttcgttccctggctttatgtatttagtcagtaaccaccttactatcaatataacatgtagtaggttagttagttacttgagcaagcactcatttggtaaacagtctaaatcactactggcaaagtcctctaacctaattaggataggtaaaatgggacctccgaaatattattgggccagactaatggtcctagatagaccgcctttctataccgcctttctgttaaatatactgccaacctcgacaggctaggttatcttgaaattcttttacaaaaaaatacggaccgatttctacacaataaggggtcaacattgcctctgatcattcctcataaatccagtcactatcatcgtcactagaataccccccagtattcgcatcatcatgactatcatcactactgctcacaatctcgttttcctttctcggtttccttttcgtcaagactcgaaacctttttctgacagcttctagatgctgctggagctttggatcttcacagaaaatcccgatgacaacccctactctgtatatttcttggatctccgcaatcatcatatccatctttcctttcatgcaatttctcggccgtccttttggttttcggcgtttcaagtgaccgaaaggcgtgtatacttgactgtttgcggtagcggatttagatggctggataaatgtaagccgatgaacagatattgcctaggaacggcacaacaccacaaagactacgtcaaggaagcaaacgaaacgaggtatcagtacctttcggggcccagagaatgtcctgggttgtgcatattgcacgccgcgaggctgagccgccttcgaagcactctggctttgaggttgaggttgaggagcccgaccaagttctttcggcaagtttggctcgtataattgccctgtctgaacaagaggcgaacaattattcatggagaactggccactgcctggatcgctcatgaacggccgagaggtatggagactagggctcgctgcgtcactcgaaagtcctgcacccgttccagtagtgtcgttcttcgcaggagagatacacaacccttgtttaggcattgttagaggacccccagggatatcgaaccaaattggttgtttgtctggaggctgtggaatggaatctattgtgggactcccagaagaccgaacagcatcgctatcccatagcattgagaacccagatgtgtccatagtgcttgttagatctgttctaggaaccggacctaaacccgaggaagcatttggagacatgggcatgaactcgaatggagtcatgaaaattccatctggcgcgatagtctgctgcggacctggcaatgcagttccttggatatccttctgaggcctattccgaatacgatcccctgtttaggttaggatctattgccatggaatacatatgatgaaactcaaccgcggaacaacatactgaatcgacgctgacattccctattttgtcgtctcctcttttcgagcttgtctccatccgtccctgtatcgtgcattctggtgctgctcaactcaaaacttaaggcccgtttctctcaaggattttgtgggtgtctgagagcattcccgatgagcggggatatgtccatattaaattcctcccaggagacaaggtatctaatggaattagcttcttagtctgtaatgatctgcctatccacctcgcaagtcacctaattggtgcctctaaagcggggttcaataatccggctcgattcttctgtgccattattgcgtactgtctggatatttcttacaacagtctatatcgggattcggtgggaatcacttacctccagccatatttgacatttttttgcattaacagcctggtcgaccataaattatgtcttccaacaactgagctgtaaatagttgagcaaaaacgagtgtagctgacgtatgacttatttctgccctggtagtagtggctagccctgccgccggagatgacggagactgtcactctagtcacgccatgaacttgagtgaatgttttgttttgttttgaatagattaatcacattctacgagtcatgagctgaattagaactcccaactatgaccagggaccagggaccagggttgcacagttgtatggatatggtttagctcgactattgagtggtaagtgacttttagtcaaaaaaaaagaacattggaactaaagcgcgaccccggtcttacgggcgtttggtttgaattctgctatgagctaatactataggaaagttgttctaagattgaattcatgttcaggcttacagctcgtaggatcagccacagattgaatatagtagacaagataaatgtaacagaatgaacaaatagcgtccgaggtataccggcctaccaaaatcaaatattcagccgtaaaagcacgcgacgggattcatccggactccggtcctaatctaacctactcaaaagctattcaaattggacgtacttaggtcgagtggagcttggtccggcggccccgcgcacgggccccataatcgtgtggaaaaatatggtttggtgcctacacctcgtcttcgccttaggtgaacggttacggcattcccaaaaatggtctgatgcaatgtgaatgaagatgaagatagctaatagtgattttgattgaaatgcggaggaacaactgactccgtactcttcctcgaaacacgcactcggatagataggtctaggctttgttccttgattagcgcacacaggttgtctgcgaattataaactggctgataatcttaactaactaggtactagaaggtaaaccgactgttggaacggggcactacatgcaactaactaaccggccccttgaaattcttttaccaaaaatacggaccctcgcatgcggggtctgccacccatcatgacccatgtagtggggagcaaccagaaggaggttacctacgcgcccagcatagaatatcaactctcaaggcgtccctgaaacttagactcaaattttgataatgcattaggatatcgtagaatattagtgccgtacttacaatgaaagatcttaatgtgagaaaaatgagcatttagaccctaccagaactcgaccaatgtatgcacgcctcaagccacagcttggcagtaataacaataccaggcattatcaaatatactgctagtatataccggcttccaaattaggaggttgagagcacctaattttcaacttccgggggatcccaacctgattgcggagcgaagcgacgtacgtacgtacatgtcacgtggccaagttttctcagggggccagaaataatagcgttctaatgggccatcatgtgatcgtcagtcgcttcgctctgcaacgactatctcgcaggccgtcgagatcactcgtaacatcatattaaaatcaatgtatggatttgtgaaaatactgttttttatttggtggcatgcatgcattagtgaagttctccgccgggctgtcgtggtagggtatgtatcttttgtatggtctgtctatgttgtacggagtagtaaagatacacctcgcttgtgagagtccgtatttttggtaaagaaggttcaaggggcccggcgagagagaggaatggtgaattacttactccgtactccgtactccagttatgtattaggaataagtccgcttcctgagtttctagtactgccgtcccgattgggtgcgacgagcagtactccgtacagagttttctgtcatattctgcccacttccggcttacatagtagaaagaaatgcatttttaatggcgatgactacgaagtgtcttaatgagagaaacaacttgcgtagtattcgactgatgatggcggacaaggagaggaggaaaaggtacctaatctagatatgggatctggacccacttggtgtccgccttgctggacacccaacaattttgatcagaaaaaatcggatactttacttgattcctataggacttaaccccttgataatgaagcagttaacgatgaagtctttgacgataaagcagttgatgtgataaaagcgatctagttttgactaccccacccatacatatcaacgggaccctaccgccatatctcaaccaatcccccggtgacaacataaacattccaatttgttggacatggtggtcacctgaccatcagcccggtgcggcagaccccaacccccataactagatagtcgggcattctgccctttaggaattgacaactctctccctctttcatcgcatcactacaatagttatatcaattgttattgtgcgcttctaatattattggaactacccccgagagaagcgagattatccccttttgtacataaaagcctataacccatatagcttgtagactttgagagcaactttgaatcgtgacttttcttcagatgaatcattgaccttcttcagatataacaaagtcagataggatagaacaaagtaagcaatcaatgatatcattaaaataaggaacacatatattccaacaggaggttaattcagagcgagtctttgatagattcaagagttccgcggtcgctgaactcttcgtggtgggcttattatatctaaaacccgttgaggcgatgagcctataactacttctgggcagaactccgtaaagagttgcgtaatcctagggataagatctctatctgtatcctttgtaacttccaggaaccaactaaataagtcggggtttgaaagttgcgaggtctctgcctcgaaaagcgcttggattttgtccccgatatcctgccggatctcagcgatcgagatcatagcgttcatcaccacgccgggaatactacatccctcggatcgacagccctgctgctgtagttcctttggaaggtcacggcataccgagaatgggagtaggcattctgtacagtagggatactgttggcctgccgagatctttgcgctgataaaattgaccagattcaaaacctgctggttgactacctcggcatttgaagaaggacagtcggtgattttatgggaggcttcggcttgcgttttacctctaagacagcatagttcgcaccggtatctttgaagcatagaaagtacgacagtcagggcctcacgtatccgggttagcggttcatcgggttgatcggtaaggggccgtcactgggctcccgagcaatgagaggatggctcaaaatatcgcgagccgccgaattgggtagagtaggtgaggccatgacaggcaatgcgaggagtaaagctccaagccagggaacggctattatcgagatcttcatattgaaattcctttggcaatattgaattcctaagatattctggaacgaagtaggataaataaggctgcaataactctctttggcttttagttgagagtcgaatttgcaaagagttgcaaattatataaagaatgcttcatggcgttacctgggctttggaataaaaatccaatattactgatgactgtggggtgagcgtaatcaatggaaatatcgaattgcgtgctaggggtgacctccaatcttgaaaatggagacttctataagcctgcagatgtattggccaattgggccagccttcatggttgattgattacctgcaagcttatctgcagtctgagctgagctgacctaggccttaatacagtaatcttgaagcggaaagggtatggaggttcaaagggagaggcaccaagattaatcgagggagaaacccaatgattctgtatcagcgcggaatattacccatatattatattttgaaagaaaacaaaaatgggtcgaaagcaggttttgtcgattcccgctgtacggaacctcgctggtctagcggcattcctcattattctattgaatttgttcggcaactacctgttcgggagcctgaaatatactgctcaacgtagccttttgaaagccaaccttgaaccactgaatgaaactctcggggtatgtcactcctaaccacgcttggggatcctcaaaattaccaaaactgcttacacaatattacagttcgaaaggattgcggttgtatcatcgggaacatcttggagactacatggcctcgtcgaggcaaccgaattcaccaatctttacattgacgtgccatcccagcctgtttggacggatactgaagttgacgagtttcgtggttatcgggtccacggccggcatggggagcttggcccaggacaggcacggtgttggttaggccatctgaatatatggcggcaaatgctgttgcaaaagtggtccaccgctttgattatggaggatgacgcagactgggatattgctatcaagcagcagttgcttcgagtcgcacccctcatccaagaagtgacgggagccacggactggtcgtcaccttacggaaactcgtgggacctcctttggcttggccactgcggcgactatatccccttgcaactagcatcatttgtagatgagacgcttccaggatcaccaatgtaccgtgagaatgatgggagattcaccgagtttcctcatcagcagaggatggttcacatgtctgtcggcccgatatgcacatacgcatatgcgctcactgcttcggctgcgtcgaaactctatcaactttccagctccggtatggataaactgatcactacgcatttgcgagaatggtgccaggaaggattcttgaaatgtgtcacggtaaacccggagctctttcaccatcacaaacaggccggtgagatttcaagtgagattggagttgtcgaaggctgggagaatcgatcggcagttgactttacgcctaatatacgatacagtgcgcgatgcagtagcaagaaaaagaggcccgcggcctgccaactcgaatttgatccagtttgatcaagggtgattggcaagcagaatggtacaggttacggttccaaatatagccatgtataaagatgtatttgggtgttcactatctcctatgtagtttgtaggtctctctttcggtctccttaggtctcggtgaggtctcgttaactagttaacgtaatcggtaagcgagtggatcaggcaatgcaacctattgaattcaaatacatttatctcgaccacaacgccattaaattaaataaactataatcattatctatctggacatatctctcttctatgtcctggctgcctatatattccatacgctcgcccggccaggggaggtggtttataacggataaaggtccgtataagaggaaaacatatgtaagcctatataggctcaggaaggaacatctttattattatatatctattctgatatcgatccgtaaggggttcgttatatgaatataggcagatagatttccttatagttctggaccccctaggggccccttcgagactagtaagaatgtaaaggtatacgttatgcaggtgtacggcctgtcaaccgggtaagatacaaagggctttgtagagggaatacaatgtattgatggtatgccaagactaattcttaccagtctcggaggggcccctagggggtcctaaactataaggaaatctatctacctatatttaagaagataaggtagtatataataatttaaagagaaggtaactaataaggtatatactttatattttatacttcttttataagggtagctgttaggactagctaccagtgtatcctgaaaatagaggttcgaattagagtggaggtccctagtgtaggtcatacaattcagtagactaatcgctaaggttctaaatctcatatatacggtatatatatacccctggcgcttacttagtaagtatatcggcctatataggccagttatataagtgaccctcggggtcgtaatattacccccctcctttataagctatatcctcaaagctcttagtatttcctttaagaggtacttctttaaatatatattctttatcttagtatagcgacctctttactagaaaatacattataatagtaactcctaacttcctcttctaccctctactatatctaactataacccttaggtctttactaggaatcctactatagcctagtatatataatatataaatcggattaatactaattatatatatatctatatatcttatataggatcttagctaattaactatttctatagtatatagctagcgcttatataatctatctcctataggcttataccccctaatatacctacccttaggctattactattactagctagatagttatcccttcctttagctcctctactatcttctctataagtccctataccttacctaatatactcctagcagtctattataccctaggtataggctcttatatagaatactattatagcctagatagtaatcctaggatttataggaagtatagtaatataagaaaggaattattaacctttaatcctttaggtaataatatatcctttactataatacttaggccttatttctatatatccttagttaatagcctacttatagtagtagctataatacctctatatactatattatctttaggctatttatactagactcttagtcctatctcttatacctactattatataccttctatattatattcctactaatatataccacttcttatagtatctttatagtcttagcttatcttctttttctttataggttacccccttttagcttttataggtagtcttatatactcttcttttttaaattaatctaatatagtagtttcttctatatatacctaaagttcctatatattcttagtatctctataacctttttatttaactagatactctatccctttatagtagcttttaaggatatattctataatatattctaattctctattaactataatagggtctagcctctcttagcctatctataggttaccttcgaaaggttctaataaagatatatattatataggatatatcctataatacctagatagtaagattaattaataggcttacttccctactattcctataacctagaaaggtcctatatagtagtagtctagtttcttataaggtctccttaagttaatatatatattctttactaggacctagttccctattataaaggttttattaatatacttcttattatataatttctttataacctcttttaacttttctaggtatacccttagatctatttatatttcctctatatctttaatatattatattatatccttataaagatctattaagtcctcttatactaaggtataaaggtctaggttaaagcctaatagagcctttataggtactatacctagaatactataagtagagttattatagataaactatattagtagtagttagtatacctagttatcttagtactaattaatatatccttttaggtagtactctatattctaattttatctttttatttatctatttatctataggtagtaggtagttaataactagtaccttataataaggaagaaatagaataataactagaatttacttataaatactataccttagttatttataaggtttcctagtattctaaagagaggtataatatatttatagaataaggttataagtctatctacttctatatcctttatataaggaatatatagtgagtacttcgtgaatatatcgactataaccataagtatatcgtagaccttatcctaccactttatagggggtaaccctataataaagtcgatacttatctattcggtaggtctctatagtactagtaatagttctagtagactatatggcttatagtagtatactgcgtttagctagtaggtcggatagttatttatatactccctaatagatttatatatatcctactactagtattttattataatagcctcctttatatactaagcttaatagtagcctacttaggggttattatagtaaatatatataatcttagcgattagtataggttcctataggatatagaccttactattatatttaagtagactattatctagccttatactctaggctgtactttctaggtagctaccctagtcctattagtctatctttataagtttcttctatactaaggtatctcttatctataccttatatataaagtcccttatagactcctagggtttaggatagagtaatatcttacctataagggcttccttagcctccttttatattataagtatatatagggagctattagtatcttctatacctaatcctatagctaggtaggtaacttcttatagttcctctactctttagtagatagcttctttaagcttatatataaaccttacctagtgctatttattatatatagaggtttatatatagtctagcctcctacttagtatatcggctaggtttgtagagctagttctaaatataatagtgaagttaaaacttactatatacttagcctatcttacttatctgtaaggtagctccttcgttattataaagttcgttaagtttatataatctatcttaactaagacctagtatatatttcctttaaggaaatgtctctatttttagaaagcttctataatcgctagtatctcttagtctcctactctatagtaggtttcttctaaccttatcttatataagaagaatataattagtttctaaatactactctctttttataactataagtagattactttaattactttacctaatatattagattttactaaggttcttagtagggaattaaagtatataaagagaggggctttttagaaaatctccttaatctcttagaaagcctttcttatagctttattaaagtagaagcctagcttctttttattcttccctttcttctatatatctaggccctagactaatatattgagcggccctataatctttaagtataatttaataaacctatagtaaaagtttgcgaaacctataaattactatatatcgaagatatactctagttccggctaagtagtaatcgcttctacttagataaggtctatagagatactattgctaaagataataaatctaaggaactctacctaagaagtatagaaggtatacttcgaggcctttatatagagtttaaactagtagagccgttctaatactatttatatatattctatataagattccttatcctaggaaaagattaagatattatttaagtagattactaggaagatatctaataatcttataagagccttatttatataagcttagaaggttataggtatatttataagcctaaacggtattatataatactcgaaatatctatagtaggttctaaataccgttttttatttattacccttcttaatatagatcctatagtatatatctctaaggtctagcttagtatagacctttatactagtaagtcttaatagggatttactaattaagggtagggagtagtagttcttaatagtaattatatttaatctatagaagtctatatatagccgaagtttactatctttctttaatataaaaagaataggtacccctatagggctctttgaatattagatctagcccctcttaaggttcttgttaatataggtatatatagacatcggcaaagcccagcatgggcccaagatttcggcccacggcccaacccatatgggctatgggcctagctcccctaggcctagcccagcccatagcccagtaggctaagcccataagcccactagtagcccatttaggcctatttttatataaataataggtcttagtgtatataaaaatgcttacttagtagaatagtatactattacttacatgtgttttagtttcttaattgaaagacagccttttatgtcctagtagccttgaaattttagtttttatttatgaaataatttttaatatggccggtcacttattatttctagaaagaataaaaaaataaggccggtttagtgatactttatagataggctggtctctatatagaaatatatattatagtatagctagtaatgtaggtatactaggtatattatagtgaattataatacctatgcgaccgaatcctttgacctaaatactgattaaagactattaggagaattaagagatatctaatcctataatataatttaaaaatagtacctaaaagaagaggggggccttataaggctaagaaggtatcttaatcctattaagtatataccttttaaaattaaacttcttttatttttttctatttttaatagtatatattttagatttaaagtatattctttactctataaagctacctactaattttaaagggctaatatatatttctttatatatcctattctatagttagctatagtatatagtctaatctatatactaaatatagttattttaggataaaagggtatataggtactactatagagaatataaattatatttaaaattctttagactatagcctacttataattaattctagaaaatataaactaatatagagactagtatataggttaatatagagactagtatatagactaatatagagactaatatatagattctattattaatagaggaggtattctatatactatagtagagggagggggctaaggcctataggctaatagttaaggttcttaagagcctagttaagaggaaagagttaactaagtattagatttatatatttctagattatattattaagtaggagctatagaaaggataggaagactatactaatttttaataatagtagattagtataattaaggtttagtagtatatttaaaagaattaggagtatattaataaagtatactaaaaggcgactatactataaggtatataagatactaaggccttctttagatatattatattaaagttaatagttaagctaactagtaaattaattatagtaaaaataaactactaggatataaggcttactattaataataaggttacctaatatatttcttcctctaggagtagggtctagaagaattataagtatattaagctaattaatatatagtaggcctactttaggctatatagtaagtcgannnnnnnnnnnnnnnnnnnnnnnnnnnnnnnnnnnnnnnnnnnnnnnnnnnnnnnnnnnnnnnnnnnnnnnnnnnnnnnnnnnnnnnnnnnnnnnnnnnnnnnnnnnnnnnnnnnnnnnnnnnnnnnnnnnnnnnnnnnnnnnnnnnnnnnnnnnnnnnnnnnnnnnnnnnnnnnnnnnnnnnnnnnnnnnnnnnnnnnnnnnnnnnnnnnnnnnnnnnnnnnnnnnnnnnnnnnnnnnnnnnnnnnnnnnnnnnnnnnnnnnnnnnnnnnnnnnnnnnnnnnnnnnnnnnnnnnnnnnnnnnnnnnnnnnnnnnnnnnnnnnnnnnnnnnnnnnnnnnnnnnnnnnnnnnnnnnnnnnnnnnnnnnnnnnnnnnnnnnnnnnnnnnnnnnnnnnnnnnnnnnnnnnnnnnnnnnnnnnnnnnnnnnnnnnnnnnnnnnnnnnnnnnnnnnnnnnnnnnnnnnnnnnnnnnnnnnnnnnnnnnnnnnnnnnnnnnnnnnnnnnnnnnnnnnnnnnnnnnnnnnnnnnnnnnnnnnnnnnnnnnnnnnnnnnnnnnnnnnnnnnnnnnnnnnnnnnnnnnnnnnnnnnnnnnnnnnnnnnnnnnnnnnnnnnnnnnnnnnnnnnnnnnnnnnnnnnnnnnnnnnnnnnnnnnnnnnnnnnnnnnnnnnnnnnnnnnnnnnnnnnnnnnnnnnnnnnnnnnnnnnnnnnnnnnnnnnnnnnnnnnnnnnnnnnnnnnnnnnnnnnnnnnnnnnnnnnnnnnnnnnnnnnnnnnnnnnnnnnnnnnnnnnnnnnnnnnnnnnnnnnnnnnnnnnnnnnnnnnnnnnnnnnnnnnnnnnnnnnnnnnnnnnnnnnnnnnnnnnnnnnnnnnnnnnnnnnnnnnnnnnnnnnnnnnnnnnnnnnnnnnnnnnnnnnnnnnnnnnnnnnnnnnnnnnnnnnnnnnnnnnnnnnnnnnnnnnnnnnnnnnnnnnnnnnnnnnnnnnnnnnnnnnnnnnnnnnnnnnnnnnnnnnnnnnnnnnnnnnnnnnnnnnnnnnnnnnnnnnnnnnnnnnnnnnnnnnnnnnnnnnnnnnnnnnnnnnnnnnnnnnnnnnnnnnnnnnnnnnnnnnnnnnnnnnnnnnnnnnnnnnnnnnnnnnnnnnnnnnnnnnnnnnnnnnnnnnnnnnnnnnnnnnnnnnnnnnnnnnnnnnnnnnnnntatattatatatatagcctttctaagataattccttttaataatagagaaaataataggataaaaggaagtttttaattataagtaaattctttattaattatattatattctatactaatatttaaatctatatatattttattactatttttaaaggtaattaatatatataagtatataatagtcttaataaatagatattaagctaaggtattaggatttactttaattcttttattttctctaatatttaggatttactttcttttattatttaaactaatatttaaataataactttctaaggatatttatttacttagtaattcttatctttataaaggaaatatatccctattataatagctttaatattatttccttaatctattattaagatagtatttacttctaaagtatttaattttatattttagtattccttatatttataatccctatattaatcccttccttttctataattacctttatatctttctctaaaagtagttagattaataatagagaaactaaattaggattaatttaaagttattttaataaggttttctttttacttcttagactaagattactataattaattctttcttttagataataaaaaatagatatagaataggataaatattagttttaatattttacctctagtctttagtaagatactattattagatataattattatatctttaagaggtttctataattttataaaaagagtttatactttctactctttaatagtttttaataggtaatattctagtaatttaaagtaggttttaaagatatctaagtcttagtataagtatatctctactttattaaataaaactaagatatctataataatattataggaattttagagtaaagttttaatctaatccttaaatacttcttagttccttatatctctaaggttattttacttataaattacctattttcctttataatctatataaaggaaatttataatagctaaaaccttttattttcctaaaatatatttttttaaaattcctttaaaaaggatattaaggttatttaactagttttttctatttttaatattataattctttttaaatattataatatctcttttaattttattcttttaactatatttactttctaatattaaattacctttatttttaaattaatttaattccttttctttttaatatagtagggtttaataagtctattcctacctacatttttacctataaatattaaaatatatatctctatatatctatatatagtactactatactttacttaatttactttgaattaaataggattaaaccctatgccaatcttaggtaaaatttaaatttaatattttatataatacccctttgccttccgtactactatacatctacgccctatactcaaaatcaatgaatcaatcttcgattatagaatagcatcctatactatctttatataccttttaaatactatctaatcctccttagaccttcctatatatattaacttaggaaataacttaaaaagtttaacctttagctaccactatataggtttaattgggtttaaatctagtaagtatagcggccactcctctatatatatcccgtgagtttcaaaccattcctatataattttagtagtatagatctaagtgttatcttactaaaagatagagtagggtcgatagaatagaagtagaccttctttaagagtatctatataggaaatagtagtatatcctatcttctttaattctaggttaataatattctcctaccttataataattaactctaatcgactccctaactagattataccctaaactatttataaaatatctttaatatataccttagtatttataagatcttttctatagccctctaaccgaaagcgctaatactattatagtctacagtttattatttattatatagaatacttatccaagaagacctagttttaaatattatttctagactactcagagtgctatttttaaataaaacaatatcgttattgagctaattcctttctaattagaatcttcctttttatcctatattttagaagactagttagtcttaaaacgttaataatagtagagtaggatagataactaggtatagtataacttagcgttttataggaccaaaaggggtgccggcgggtgagtataaaaagtaaatggtaagttcgattactaaagatccttaggcgactagttcgagggagagatttaacagtattatattctttaaactgttttaaagtattataaatcgttcggcgggagtacctaaaatcgagtgctagctttaactgggtagtaccggcctagtgggtataaataatagctgagcgctgagcaatagatagcttacctgattttatacgacctaaaccaaggatatccttggttaatgtcattggggggtgtataggaagaagaaaaaaaaccacgatggttgttagggggatagtaagtggggcagtgggaacagactttttgaatactatgtatagagaatatctaagaatagctttttatataggatttttagtagtaagggatttaaagaggtataaatttagcc

SEQ ID NO: 160 - DNA, 235288 bp, Penicillium roqueforti
  misc_feature (2719)..(5484): n is a, c, g, or t
  misc_feature (6369)..(7199): n is a, c, g, or t
  misc_feature (41344)..(41902): n is a, c, g, or t
  misc_feature (188473)..(188627): n is a, c, g, or t
agggatgattgtaagattacgttccctatcaagaaacctcggatactattagtaaatctattgggtacaggtcatatcttaaccagaattaaaaagctgaaaagacaaggatggcttaaattgaaacgactgagtcaggctgtttatcgaaattcaaaccagatttcgcgtcttcgtgcgcacctatcattcttacaagcagagctcgaaaaacggatatcatctcgaaatggttcattgaatgccattttgtgtatacaggagctgactcaagataacctatccccaaggcgaatatatttgattgggtctttgttagttcagcattatctcgagaaatggagtaaggggccagttgatagaaataggatagatgttccggggtcgaccgctctgttaattgaccaaattccttccctatacacgtgacattatttttagctactttaggcagaagtgatatcgaagtattatctcatcggtcatacaataaacaatagcacaatgattaagttaaagctggtactagctttcaataattctacattgcgacacagcatatattacttcaagcagtctaggaaacttcttaggtagcgatagctttcgatatattaaagggcattaccaacgcacaagctataggaaaagcaagctcccccattttaaaagttctatcagattcaaattacatgtcgagggacactatatacagtagtagttataccagcttggtcattgaacctatccgagaatgattatgggccgaagatctgacttcgccagcctgatcactcataactgcatgccctcctattccagcggttaatgctgtcaattatctgcctaccctcacagcacctatgtgtcgtagactcccaatctctagtagtttatcggccacatttatctactactacccatagggtgaggcggaaaatcgcgctagccttgcttatctggtttgccagaacactgtcctcgtcaaataagtaccatatcttaaagttttatacaagtgcttccttgaattgcgatacaatatggttctcagttatcccattaattgcaaaatctccctcggttgagataactcctttagcttcttgcttctagggttaagaacatcctacagtattacagtgtcaaagccatccttataatggttagcagtattattttctattagtggttcaaccgtatgattagtccatcttttctactattacattgccaacccgtagatcgtcattcggctaggagtatgggaaattctatacaaggctgatagcagatagtagagctaaacattgctcgcctctatagtgcacatcctgtgtggatcggaacttctcgataactatgtctcctgtaagagtttgtattagtgggctcctacatcgcatataagcttgtggagagagctactgtggtacaccaagtatattatagttttcacgtagatatatagaattaaggaaattcctcctctagaaatatcactatagtagagtgaccagtcgtactcaggctacgataccaggctagcagttcgaccatcatcttctaccctacaatgaggcttgtaggtcggtgtacattctcctaataggctcgaagacaacgcgcgctaaacgtgatccattcactaggcagagctcttcgcattccacttaggcttcacatgctctttcaaccaggttacagattgtgttctgaaaatttcggagaagttgatagacaaaatcagtcgagcgctcggtgccggatttataaagcctttgtagttcggtgaacgtatgttctgtaagctcttagagtagcttgaaaagggaatagcaatcgcggtaatatgcattataagcttattattagccgatctgacgtacaatctatacaatatcctccatggtactatcacagaagagagaaagaatcacaatcgactctcaggttctgtatttacataatgagagataccaattacatagtcagagagtcggtcggtcggtcggtcaagttgaatatcggtaaggcgaaaaaggaacttttggcaacccaatataaatatactcatttctgaggttccggctattaagataggtggttattacagagacaatggttcctcgcttcaccgtcctatccctcaacaacgcgcaaagcgtcattgccatcctctatatacccccataaacatcccatctcatagtcaataaggacactctgagacccactcttgcctacaaagccaaatgctcgcccgagggattactgctcgagagagccggtacttactttgacttcgcaaaatagacactctcaattaccgaaacctacgcaactatgccatcggtatcattgtgggcattcttggattctcctactttgttatttatttactattattcttgattttccacttcccctcgtctcaacagtcaatcctatacactctggcagtgatagcgtttggtagaggaagcgccatatggtatctagatattgtctttcaaaatagcttcagtatattccagaagacaaaagtaacgaaagagcaagattccatatggtttagtggtttattcctggtctagacagcagctcttcccacaatcgcttttctctttccagcccaaccactgatacagcttggatacgcatcggctttcaccctaatcgctattagaagcctctcggacggttatctcaaagacannnnnnnnnnnnnnnnnnnnnnnnnnnnnnnnnnnnnnnnnnnnnnnnnnnnnnnnnnnnnnnnnnnnnnnnnnnnnnnnnnnnnnnnnnnnnnnnnnnnnnnnnnnnnnnnnnnnnnnnnnnnnnnnnnnnnnnnnnnnnnnnnnnnnnnnnnnnnnnnnnnnnnnnnnnnnnnnnnnnnnnnnnnnnnnnnnnnnnnnnnnnnnnnnnnnnnnnnnnnnnnnnnnnnnnnnnnnnnnnnnnnnnnnnnnnnnnnnnnnnnnnnnnnnnnnnnnnnnnnnnnnnnnnnnnnnnnnnnnnnnnnnnnnnnnnnnnnnnnnnnnnnnnnnnnnnnnnnnnnnnnnnnnnnnnnnnnnnnnnnnnnnnnnnnnnnnnnnnnnnnnnnnnnnnnnnnnnnnnnnnnnnnnnnnnnnnnnnnnnnnnnnnnnnnnnnnnnnnnnnnnnnnnnnnnnnnnnnnnnnnnnnnnnnnnnnnnnnnnnnnnnnnnnnnnnnnnnnnnnnnnnnnnnnnnnnnnnnnnnnnnnnnnnnnnnnnnnnnnnnnnnnnnnnnnnnnnnnnnnnnnnnnnnnnnnnnnnnnnnnnnnnnnnnnnnnnnnnnnnnnnnnnnnnnnnnnnnnnnnnnnnnnnnnnnnnnnnnnnnnnnnnnnnnnnnnnnnnnnnnnnnnnnnnnnnnnnnnnnnnnnnnnnnnnnnnnnnnnnnnnnnnnnnnnnnnnnnnnnnnnnnnnnnnnnnnnnnnnnnnnnnnnnnnnnnnnnnnnnnnnnnnnnnnnnnnnnnnnnnnnnnnnnnnnnnnnnnnnnnnnnnnnnnnnnnnnnnnnnnnnnnnnnnnnnnnnnnnnnnnnnnnnnnnnnnnnnnnnnnnnnnnnnnnnnnnnnnnnnnnnnnnnnnnnnnnnnnnnnnnnnnnnnnnnnnnnnnnnnnnnnnnnnnnnnnnnnnnnnnnnnnnnnnnnnnnnnnnnnnnnnnnnnnnnnnnnnnnnnnnnnnnnnnnnnnnnnnnnnnnnnnnnnnnnnnnnnnnnnnnnnnnnnnnnnnnnnnnnnnnnnnnnnnnnnnnnnnnnnnnnnnnnnnnnnnnnnnnnnnnnnnnnnnnnnnnnnnnnnnnnnnnnnnnnnnnnnnnnnnnnnnnnnnnnnnnnnnnnnnnnnnnnnnnnnnnnnnnnnnnnnnnnnnnnnnnnnnnnnnnnnnnnnnnnnnnnnnnnnnnnnnnnnnnnnnnnnnnnnnnnnnnnnnnnnnnnnnnnnnnnnnnnnnnnnnnnnnnnnnnnnnnnnnnnnnnnnnnnnnnnnnnnnnnnnnnnnnnnnnnnnnnnnnnnnnnnnnnnnnnnnnnnnnnnnnnnnnnnnnnnnnnnnnnnnnnnnnnnnnnnnnnnnnnnnnnnnnnnnnnnnnnnnnnnnnnnnnnnnnnnnnnnnnnnnnnnnnnnnnnnnnnnnnnnnnnnnnnnnnnnnnnnnnnnnnnnnnnnnnnnnnnnnnnnnnnnnnnnnnnnnnnnnnnnnnnnnnnnnnnnnnnnnnnnnnnnnnnnnnnnnnnnnnnnnnnnnnnnnnnnnnnnnnnnnnnnnnnnnnnnnnnnnnnnnnnnnnnnnnnnnnnnnnnnnnnnnnnnnnnnnnnnnnnnnnnnnnnnnnnnnnnnnnnnnnnnnnnnnnnnnnnnnnnnnnnnnnnnnnnnnnnnnnnnnnnnnnnnnnnnnnnnnnnnnnnnnnnnnnnnnnnnnnnnnnnnnnnnnnnnnnnnnnnnnnnnnnnnnnnnnnnnnnnnnnnnnnnnnnnnnnnnnnnnnnnnnnnnnnnnnnnnnnnnnnnnnnnnnnnnnnnnnnnnnnnnnnnnnnnnnnnnnnnnnnnnnnnnnnnnnnnnnnnnnnnnnnnnnnnnnnnnnnnnnnnnnnnnnnnnnnnnnnnnnnnnnnnnnnnnnnnnnnnnnnnnnnnnnnnnnnnnnnnnnnnnnnnnnnnnnnnnnnnnnnnnnnnnnnnnnnnnnnnnnnnnnnnnnnnnnnnnnnnnnnnnnnnnnnnnnnnnnnnnnnnnnnnnnnnnnnnnnnnnnnnnnnnnnnnnnnnnnnnnnnnnnnnnnnnnnnnnnnnnnnnnnnnnnnnnnnnnnnnnnnnnnnnnnnnnnnnnnnnnnnnnnnnnnnnnnnnnnnnnnnnnnnnnnnnnnnnnnnnnnnnnnnnnnnnnnnnnnnnnnnnnnnnnnnnnnnnnnnnnnnnnnnnnnnnnnnnnnnnnnnnnnnnnnnnnnnnnnnnnnnnnnnnnnnnnnnnnnnnnnnnnnnnnnnnnnnnnnnnnnnnnnnnnnnnnnnnnnnnnnnnnnnnnnnnnnnnnnnnnnnnnnnnnnnnnnnnnnnnnnnnnnnnnnnnnnnnnnnnnnnnnnnnnnnnnnnnnnnnnnnnnnnnnnnnnnnnnnnnnnnnnnnnnnnnnnnnnnnnnnnnnnnnnnnnnnnnnnnnnnnnnnnnnnnnnnnnnnnnnnnnnnnnnnnnnnnnnnnnnnnnnnnnnnnnnnnnnnnnnnnnnnnnnnnnnnnnnnnnnnnnnnnnnnnnnnnnnnnnnnnnnnnnnnnnnnnnnnnnnnnnnnnnnnnnnnnnnnnnnnnnnnnnnnnnnnnnnnnnnnnnnnnnnnnnnnnnnnnnnnnnnnnnnnnnnnnnnnnnnnnnnnnnnnnnnnnnnnnnnnnnnnnnnnnnnnnnnnnnnnnnnnnnnnnnnnnnnnnnnnnnnnnnnnnnnnnnnnnnnnnnnnnnnnnnnnnnnnnnnnnnnnnnnnnnnnnnnnnnnnnnnnnnnnnnnnnnntgcgaacggacggaattaatatcgcactttgcacccgcgatatacaatcattagccaatggcatccatagggtagcgagtgaggtcttagattaataagagcacgcaacaggatctgaattcattagtaatcgtgcgtcaaaggcagcattgaatataatatctaatgatataccttacaatttagtaccagcttcatctagattcaaatcatcatcggtattatgatattatccatagactgtgaacgtaggctaccagcgatataagctgtaagagcttcgagctaggggcttgataaaaggatttcccagacagtaaataccgagacccttactatagtttaaaccgacaattataacatacattatggctttgatttctcatattttcacccataattactatgtttatttagttcattcgaaaaatttcactctgtcaaggcagatatggtagtcaacttcgtccaccacaattgtaacgtggcatttacttcctaaagtactaggtcgctaacctcctacccaccttttaatattcttctatctcggtctaaatcttagcttaaattcaaattccatactgacctcatacatatattcaatcgcgcatcaaaacatagaaggtagtctaacgatcattctttatataacacaggaggccacgtcgcgataccaagatactttcaagtacctactaagcctaccgcttaagtgttagtactggaggttcttatccctcagacatatctatattatagtggacgctagatagataccctttctactgagtcttggcagcaagaaaagcctttcacccatagcagggacccgagtagaaaaccaaggctgttacagtctggcgtccagtagagccatcagannnnnnnnnnnnnnnnnnnnnnnnnnnnnnnnnnnnnnnnnnnnnnnnnnnnnnnnnnnnnnnnnnnnnnnnnnnnnnnnnnnnnnnnnnnnnnnnnnnnnnnnnnnnnnnnnnnnnnnnnnnnnnnnnnnnnnnnnnnnnnnnnnnnnnnnnnnnnnnnnnnnnnnnnnnnnnnnnnnnnnnnnnnnnnnnnnnnnnnnnnnnnnnnnnnnnnnnnnnnnnnnnnnnnnnnnnnnnnnnnnnnnnnnnnnnnnnnnnnnnnnnnnnnnnnnnnnnnnnnnnnnnnnnnnnnnnnnnnnnnnnnnnnnnnnnnnnnnnnnnnnnnnnnnnnnnnnnnnnnnnnnnnnnnnnnnnnnnnnnnnnnnnnnnnnnnnnnnnnnnnnnnnnnnnnnnnnnnnnnnnnnnnnnnnnnnnnnnnnnnnnnnnnnnnnnnnnnnnnnnnnnnnnnnnnnnnnnnnnnnnnnnnnnnnnnnnnnnnnnnnnnnnnnnnnnnnnnnnnnnnnnnnnnnnnnnnnnnnnnnnnnnnnnnnnnnnnnnnnnnnnnnnnnnnnnnnnnnnnnnnnnnnnnnnnnnnnnnnnnnnnnnnnnnnnnnnnnnnnnnnnnnnnnnnnnnnnnnnnnnnnnnnnnnnnnnnnnnnnnnnnnnnnnnnnnnnnnnnnnnnnnnnnnnnnnnnnnnnnnnnnnnnnnnnnnnnnnnnnnnnnnnnnnnnnnnnnnnnnnnnnnnnnnnnnnnnnnnnnnnnnnnnnnnnnnnnnnnnnnnnnnnnnnnnnnnnnnnnnnnnnnnnnnnnnnnnnnnnnnnnnnnnnnnnnnnnnnnnnnnnnnnnnnnnnggtagttagggggcggggcccgccatactggccgatgaagtctcaactcttgggttatttcttttacaataagaaaagatataaagagctggggctgatacttatagagacacagcagaggtcaattcagtatcacaccgggccacagtgatcatcataggcgcgataagttggtcctttagtggtatcaagacgtcagtgttgttcgtggtttagcctacaaggcttagcacaaataatcagacccggcgcagcagtaggcgttatatctcataaaccttagcatagaataaaatagaagtctcataatttcacataacagagctcgcacttgaaagtccacaccctattgttaaccagatattttaatttacaaccttccactctaggcatactgcattattcggggccaggaatagtatatatgccatggctttacgtagagtactgccagtagtacagggttatcagggccgctctggtgagctcccaaaggttcactgtcaattatagtcaagaccagggattaagagacaacaagaagccgtggcccttgccctagtatattgtggtcgaacttccacggatctagttgccccgcgtctttcgggtcagcgcatttataaggatttgtgggcttatatacctacagtgtaagcagttatacttcaaacttaagatacaaccagacccacgatagtagatcagctcagtcggctactatagcagagacgtcttcgtatagtagataccttaactagtcaatccaaatctttgatcttcgatcggctggctgaataggtcagtgaatcacgtctcttataatataggaactgtctgatctactagtctcgatatatactacaaatgtcagtacagtacaaatcccggtatataccggtccaacgggagaacttatcgagtgcatcagatataagcctctcaacaggatcaagtagataaatcgtagagcaaattgcaggggtagaggacacatctacaggcttctcagtctctatcacttaccaacttggtagcaattaccaaaagacatagttcttaattgaggcctattaagacgccttatacatttggcagtaactatttgcagcgatatctttaatgtttttacgtacttagcgagagagacgagtaaaagaggtattagcaatgaaagggataccgagttgttttaaactaagtggctctgtccgtctagactacggaaagtgaggtcacagtaggatatatgggtgctcgacccattaacccgttaaagcttggccaaacatcgtcaacactcaatttttgaagttatcaccaacctgcgaggatatattcttttttttttcttttcttttttttttggtgactcttcagttctataatgccgtttgccaagtttttgaggcttccaacgaaagtagaagtaatatctagttgagatatctttcacatcaatagccgtctatatctggccctcaacattatcaggcttaatcagttttcccgaccgactcgttgatacccccaagcgcccgctaaaaataagagcaaattctactcagaagctaactctattgattgactgatacaaggatcgtaaaacacagtctataaccatatacgtctacgttatctataagaggcaccaagaatcgatggaaatggtattgccctactccttgactttctcctgcaaataaatggattccctaaacagctcgccaggccaggaaaaagaaggaggacagcagcccagtgaatcgctagtccttagtgacagggaaaaatcaatggaaaaatcactagaaactcctgactatatccctctatcggtaagtaaaaccatttagcttcatttacttttgctgaatattgcagccctcccttttacgacacgataaagaaatcaaacatactttagcgatcgagccctttcaacctattataaaggtactagcagacttcgaacgcgacgatctcaagttcgcctttcccgcggctcgactggtcggactctatagacgcctgtaggagtcgtgcgtgtccaagcatatcgatggccagaagctacagcagagtaatcagatattaaaggaggctggtacgcacctgagaagagagagggacggtcttcagctataccacaagaagcagctagctcaactgcgctttttcgaacaggctttagaatcaactcaggaacgactgattagtctactcaatgactagaactacccttccaaacccaatctggcagggctaccaggcatggcaaaagaagggtaaaggattatacattcttaatcgtcctatatcttattcttacacaagaaatatccaccaatatcgcaaataagagaatcatcgtgtaaaaaagtagctttttttcattctcctaaacaaaaaacattcatgtggaggcggccatttctggcgtcaaagggggccgaaagtggcctcctcggcatagctcttccgcacacgtactttcggccccagagccacgcgctcatcgcctacccctagagaactctgtatagagacaaacgaatttaacgctatagtacgcacgacattacgttatcattatcaatacctccctcgcactcgcattccctaaagttgaagttcaagaagaacattcttatcaactgtttttttaagagccgcaatagcaattgccggcaaaactgtcagaaatgcaatactctcatcattgttcagaaattcttaggcgtagcatgaaattgccttaattatggcatcccaaagctcagtctcaagaggtagaagagtggcccagatctctcacataacaaatggatatctctaggcatttttgtcaatccagttgacgagacgagttcttacaagctgttttaggggcgcaatgtcaaatttgtcggctgccataagaactcctaggttattccacaaaactgcgtgagaatctttatcttcgcccgagacagactgcaacagattatagcgcggtatactgcgaacttacagccttcgcatgatatcgttaggtcggagtacctacctgattccaggaggctttgcaagagtagttgaagatctggaaaccccatataaaatgagagtagtaaaataacatgagttagtcaacgcaccgggcatctgtcatccgatggtttttataattgcccaactatctgtaatcctcgaaggtatataacgtcaaacccacgacaccaagttccgcgtataacgaaagtagaaattccagtggcagcccatgtactccgaggaaccctcacttaagccccaggaaaagacatcgggtagctacctttatatatttattaatatggatacctattggctacaatgtgctcaaattcactgtgccaggtttcgcgctaggtaggctgggagtggtacaaccaaaaaattccaagggaatatataccagagcaaccattagtagacataggcaatgtttaggttaggatgataaggtacagacgcttaataaattgtctaaaaacatatgagtttagattcgtgtacaatactatatcgaggaaagaaaagaaagcctgtattatcctaccataatcgaaacactatggtttccatctactccatttcccgtgcccaagaaacgccctcaacgactatatgattttaacctccaataggtactccacattcagggcatctagcttgctccatcggcataccgcactctccaatagcaaactatagaaaaaattatttagttcgtcaaaggtaacttagggcaattcgaggaatgggaaatttactcaccagatgtccagtagtgataaggtacagacgcttaataaattgtctaaaaacatatgagtttagattcgtgtacaatactatatcgaggaaagaaaagaaagcctgtattatcctaccataatcgaaacactatggtttccatctactccatttcccgtgcccaagaaacgccctcaacgactatatgattttaacctccaataggtactccacattcagggcatctagcttgctccatcggcataccgcactctccaatagcaaactatagaaaaaattatttggttcgtcaaaggtaacttagggcaattcgaggaataggaaatttactcaccggatgtccagtagcgcaattgtaccagtgcccagaataagtcgccattcctcctcgtctactaaccatggccatcttgattaactgaagttcttctaaagtgattgtttcgtatcgcgtttcctcatagaggcggaccatctcctagaccttttgttaaagctcaggacagttcctcggttcgtcgcatagttttaacgcagcggcgaggagatcgtgggtggtttagaagtaatcttagagattttctagaccaatttttcctttgagatatagatcgcttattgtttcccctggataagagcggtgataccacgcgtccagctgggcgatcttagcgaataagatggtcgccgtgatgacgatgcgggagaaatttccttcgttggcttgagttatcaagtctcgacaatccttcagaacttaaatcaaggctaatgatagtttggcaaagcttagaagtggtagcgttacagattttccgcttgaatctatcactctaaaggcatcgctaaacatgacttccttggacctgatataaattaaccgtgcaccgagggtgatttggttatcggatttatattgctatattcatcgcctccattcgggctgagagggaggctacatcgtcccttggtgacttctggtagatcgcaatcgcatccataagtcgtttcatcggctggttctcggcctccatggctttgctgagagctgagagctagagcctccgtgcatatcgtgcttcatgttgtaatttagtctccctcaccgccaccaacgctcgctcagagttgagcttgtcttcaatgtcattcagacgcgattcatggccttcaaggtctgtgcgacccttgataaggaaccgcttacaagtctcatccataacagcacggttgataacacgattttaacgtttcgtcacaaactgacgaatgggctgcttacagtccgatcacgatggtatgacactggcaagagaagaagagacatcgattgaacagacgtcttggagaccgtcaaatcttccatctttatctttcgtgtatacttcatccaggccaaccaatccatcaaccgactcactgataatgaaattgccgcatccaagcacgatgataggagtttcatcgagactgatttcggaataagttttccattcgaggaagtcaacacgagcgtctcccttgtcgccggcactcttgacacagattgtttggacagtcttccccgcagaggctcgggcattgatggccgcatctgaggatcttagtgcatcgctcattgcagggaagccgttcgcatattgccgcgcaacgcattgagcaggagcctcggtgtttgcaggaccaggtgcatctctcgatgcatggtgcacatgcctttctgcaaatcaagtcgcatgctgagtgtgagcatctaatctgtacatatgattaatgtctccgatacgatgaccagacgatgaattctaggattctgacttcgcaatttgcctcgcagtaaccacagctctcctcatcatgacatatcttcggacagctatgattgcaaacaccgtgggggcggtcacatcttttcgtgcacttcgggtactcaaatactcttcttccgtcatggacttcctcgagacaatttccgcagtaatcactgcagttgtggccacaactgagaatgtcgctgcagggcttagagcaacggaagatcggggacgtgacatctttgtaacagccaacctgaattgtatggccacacttaggaacactcttttcgaccttggcgtcgcacctaatgactttcaggttaggcatttgatggcaaaagatagctttcttgatattaccacaaggaagctccacgtcttaaatcttcgccatgcagggtcataatcttcactataaagcttggggcattcgtgctcacaggttgatcggatacatgggcaaggtttcccacatgcaaagccctcatgcatgaccgccgaatggcactcagcctggcattgatgaacacatggctcgggtcgacgggtacacgggagactgcacccaccttcagggctcttcttctcaaagtcatgaggttcataacagagaataggcttgtctgagtggcgaggacaacagagagccaactccgtgccgactgcattcgcacgggcgagctgagagtggacatcggcccacattgggacattgagctatgtttcagcatttccaatcagatacatgccgtgctaagctcgactgaggagcacgttaatgcggttttcggtgcctaggaagccaaccttgcgctttgagttgctgcggactagggagacaacgatcacccttgcctcctcgccttggaagttgtcgacggtagcaaggcggagcgtctggagcaacgtcttcttctcgaatgccttgcgaccatttggctcaggatattcatcttcaaatctcccaagcccatctgtggccaaggtttccaagtcccgctcgccgagacaaacttcgaaatcattggttagcgatgccctgagcttccgcagctgcccggtatagggtgccaaaagggcaatatccatgctcttgtactctccctgcagaacaagatgccgaacaagaacagtagccatatcgacttcccactggttgctatgagacttcacgcgactgccgtcatctcttgaatcttcatcgcatcgatggtccagccaaatgaggttgttccacattccaacaatcttgggtagattcagcacgctttcatgatcctcaagttttggatagacgctcctgatatgttgcgagatatcgggtctcattcgtcgccgtacattaagctgtgcaatacgggcaggattaagacctggttcaccgagagcgcgtctctcaaactggcttctctctagctgccacgtctttcttgtggatgattcaagactaagtgaatgtgtttgaatctgtggtcgcagctgtcgatgatccccaatctgaatgaagtgttcaactcctgacatgagggctgagatgacgtgggcttccattatctcagctgcttcctcgcatataatgacctttgttcctactcggcgcagtgtctcgatatggcgtgcaagggctgtggttgtgattcgtactacatctacttgaatcaaggctcggcggttgatctcttcgtggactgcattggtgtctccgcgaagatttgcagcgcgatcaagagcctcgaaaagcgaagcggtttcgatttcctgccactgtctgaaccagctcattgcaagaatctggcgttccggtatcgagagactgtgaatattttcattcgcagcgcgtgtgaggccttccaagcgcacatcgtcaacttcactctcattctgggttttcatcgatttggctccaagccagttaggtaatttatcatcagtgacagtcgtgaatccttccgtgtctggtcgctccagttgttcatgtatgatgggccattttcggtgcaagaaatggtccatcgcggcccaagacaggcctttttgagactggtgtagaggtttcattgcatatccagcattattcatgcagtcctcaagtctcccgtaggacataccgagggtttgcgactctaccctcgtcttcccaatgcctttactgacaacgcgaaggttcttgccttcaagctcagtggcctgactgcggccaccaatgcgtatgattttctgataccaacatcaagaagatgctttaagaattaggcttagcttttccttttcgttgatctcaaggagaacttgaacaagcttaacgcccaaataggactttccggtgcccggtgggccttggatgagggcatactctcgtgtgagagccgcgataagtccctggcactggccatggtcgagaccagtttgagtttgcagcttcaagagattaatagattcaggggtaatagggtccaatgcaaccttttcggcgccaacagttgtgatcgaagtcaggggaaagataagtttacgcgcctatgccggtgggggtacgctgtgaccatcttcgtcatccttacagcctggcaagatccatttttggaatgccaactctccttcgcattgcagcctatcggctttatatcctttgatcagacatgtttgcctgatgcataccgtcctagggcacggggtattctcgcgccattaacatgtattagttaatttgcaccgaaattacgtcactgctaacgtgacttagggtattaccctttcgggtaattccctatctgtgtttttagccatttcttgaacttacgcttaagatgtacattacctagtgaaatggtttgatatatgttgcaaagtctcataaatggtttggcgtatggctgtttctctctatctttgattttcttacatttttatagccatggggctacggatgcggaagagacaaacgaaagatagttacagtggtatttcacgcttatttgcaatccagcatctcaatttctgaccgtctgaatacctccactttgagtgtcatgttattcatgatggtttgtctttggttcctcgccagttaaaataaatgtttaactgattgatcccaggtctgaaattagacaaattagtatttccaagatacctcacttttggatcgggataggctcggggtaggctcagggtagctcagggtaggctcagggtaggctgggctgtggcaaaattgggtctcgactccgatggggggaaattgtgtaagttccccgcactgtattgtcacacttagttatccattacccgccactaccgctatatgttttttatggtaactttacaccataccggaagaatatgttgtaatacactgtaatcgtgccacgccgccaacacaactttcaacacgggagagtgttgatgggccgggggcgattacatagatcatggaccatcttaatagatcctcagatcaattgtcttatcactaattggtcttcctcgatactgcattttagtagtatgcagtatactggcggatatcattaatttggctgtaaagtgcagggtgtatatcaccggttcgaacacgcttgaagtccggtgcccgttttacttgtcatttcaatctaggccttagctgtggtattataccacagtttcatgattcggatagagggtagatgagggtagatacataccaaaggcccggagataaggcacagaaaggtgcactggtggcctcgtctttccatcagcaatatgccctagctctggtttaaggtgtcaagggaaacgcggctcagtaaatagaggggaggcgtggcctggcatgagatgaatataatgcttaagatgattacattcagtaaaggaacgaagagcacgacatgacaaaggtggcacatatgacgataccccgttccttccgccaacataacgtcttttacctgaaattggccaggtttatggaagagcaaatcaaacattgttgttacatggcaaagaccagctttaccaagatctaaacgagtttatagatcccaatcaagatgacaagtattgcacccataaccttgaactacggaataccccgatagcatcttcatcaagtgaggaaacggaaacttcttcctattcatgtcagaccaggggctgtttaagaagagcgaatgacagtcccatgcactctttccgcatggttcagtagcgcggactttgactccaacttctcaccgcaaaaagagcactcatagtgcatgtcattcggaaacagcttgatatgctttttgatggagtgtcggctcagagatccagagggcttgtacatccacaagcgatcgctttgtggcagaccagggctaccaaggcaaatgaagcaagtcgttggtctttctgttggagatttaacgcaggccgaagaaatagccttcgaaaaagtatcgtcgctcttatctgaaagggttggattctgccttttaggcaggagggcggctggtggcatatcgacatcattggtagagcatttttgggtgacacaacgccgcgagggtgcaccctcttctgcatccataccgcaatcactgcatttatcgcagcaattcgacgctcatattctttctcatgcatcgtacccagcatcgtcagcacagtgtcaataagtatcctgtaagaaatttcatcgtgaagatatcggtgtacccacgaatataccaattgttggatcatgtctatcgtgggaaatacaacggcttcagcgctatattgctgtttaaataaagcgtttctttgaattcacgcactttcttgacaacttaaataaaccagctagaaagttgcgggactaacaagctttttcccgaagtacttccattgaaacaatctgcatcaagcccatataagacagaagacattggaaaatttcccgaaatttcgtttatgtccacacaaagtaggcggccagaggtatctgtggaaactttgaatgtgtgattggatatttcgcaagcgtgctcatatatcatcatgccttgaacgcggcacacttctatatccagatatggatcatgggacctgggtctttttctagtgcaggctcggcatatagtcgcaattaaatgagatgatggttctggctttgttttttgtagtgaaggaagtccaattgttcacggccttcatactcaatcaacaaggctgccggacacctgcggcactaaataagcatgtgaccacgtgtcaagtccagttgtccctttgcagataataagcagagttcgaaatgcatcaaccaaatttttgactcacatcatttaccctcatgaatgttgcgtcgtcagatggggcacttctgaccgttgtttcagactgtggtgtatcaaggacaaatccacttgagttttcgtcctcgtaggggccttctaataaatctttggactctgaaatccctgacccaatagcctcacttgattgaatagggtattcaacttcagtttcgatagcctcaggtgatccaacattattttcaacatgctcgggcccgggcttgggttcgggtgcgaagctggcaggtggtcttgcatcgcgcgaaaggcactttgaacaaatgtttctttcctcccatgattttaataactaaagatgggtgggtatatcttcactgatttgaagtgtaagaatctgcggaggtaatactataaattgtcgatcatggtattgctctgattttattactatgactcgttattagacatcttggctacgagtggtcatcaacgtgtttcttcaaaatcaataattgcgcgatcggatgtttgcatattgtacacgcttgacctcgctttgtaagacacattcaagagagaaacaaaaaaacatcgaatatttaaggaaggggtaggccaagagctggtaaaggtagactggagacagttccatgtattcttcgcgcatggttcaggagtcccgtttttgatatcagcctttccccgcaaatgttgcaatcacagtgcatgtcatttgggtacggcttgatatgtttgttgacgaagtgtcggctgagggacccggggttcttgtacattgtcaggcggttgcgttctgacgatctagtattaccaagacaaataaagcagatcgttggtctctctcctggagatttgacgcaaacagaagcgatcgccttagagaaagtatcaccactctcatctgaggggatagacgtctgcctcttaggcaggggggcagcaggtggcatatcggcagtatcggcagtgcgtttttgcgggacacgaggccgcgagggagcaccctcttccgcatcacagaccgcaatcactgcattgattgcagcaattcgacgctcatattctttctcgactgttgtacccggcagagtcagaacactgtcgataagtgtcatatgatgcggtgtcatatagccggtacgttgcaacgctcccataacttcttcgtcaacaatttttccggaaagttgccgctcactgtcgatcaccggctgttcatttttgtaccgctccagattttcacgaattaatcggtgcttttgccatcccttctcgtttcgtaattgcttcactgtgcgaccataccgctcgtctgcataatcaaatttctggcgtagctttttgacacctttctctttagccttccaccgcttgcggattgttcgggaatgagggccactctgcggtgggttatcgccgaactcctgctgtaatgcagcgtgcgcttcttcataggtgcgcttcgtagcatctcgaatttgctttctcgtctgttttctatcttccagggtacgcacacggggaatatcattgatacagctcgaatcctcaagccgatagggtctgcgaggatcaatcgatcgactcattgagcaggcaaaccgcatgagctgtttctgagcgggcatgccccgcacaattgcctgggcatctacgtggatacccacactatagtgccggacaaaagtatcaatgctggcgtgctgcagcatcacgttctgcaattcatttgatacatccgctggtagagaggaacgcattagccaaaaattcctatatgcacaatgtgtcactcacaactatcgttgaacgcttttgctgcgccatatcgaagacaatatggcttcgctacttccgcgaagcccgtaatctcaccacctcgtttcattctgtaacgcagccatgacccggtaagtcccttttcgagtgcgattcgaaggccatcagcctctcgtactgcttggcaaaacacattctgatcgagaatttcgtccttcagctttaattcctgctcaccaagtccatctaggacccgaagacggtacaatttctcgggacagtccatcacagggccgtcttttgatagacttttgaatgcgctaattctaaatagcatgcctagcaggaaaacatgaggactaaggaccaacgtgggatcaaagatgatctccggaatcgggaaggtgtttctgattgaaaatgataagcaaaagggcgatgagaagcagtggctggaggaaagacaagcataaggaatggcttagtgaggggatattcttacgactctttttcaccaagaaatgattttgtgaattccggtctcaagtagatgaaaagtcgaggatgtcctccatttggatcccgaaccagtgtcaacttgagatcctggaagcgaagtttcagtagcgccccgggacggctaccggtgatggcggccagctggcagaaaaggaggagttgtatccggtaccagccacaaggaaaagtcatctctgtcgtggataggatcactcgggcaaactcagccacatcctcgacatacatggtcgctttcggtcgacctttgagggaaagtttcttatctgaggcaactatcgcgagcacctatggaacgtcagtcgcggaccatttatgccgatatcgatactcaatcgagatctcacatcgcggatcttaacttggatatctttgctgagctcatgtccaacctcggccttgtagatcagatgccaccacttccagaataagtcgagcgagcttttggtcttcactccgggggtgcgacgtccatcctttccccgtcgctggtcacaccgccaagagaagagagccttgaggaagcgtaccgtctcgtctgtatcagagagccagaacaaacattccaccggaccgcgctttgtgccattacaaaatctagaacaatcagcgagcccagtaatagaagcgggatgttgcaatgatgtctcacctatcccaaaaatcttgcgtctcatccaatttctcctgagttttcgggctgtagcgtttctgtcggagctgggagacatcgagagactcggcctcctggagatagtattctggtggaagttgctcctcctcatcttccgaagccagctcatcttcgggctcatcttcagactcggattcggattcgctgctcgagtcgaagacgctaggtgcgatggaggaatcagggtcggaagcgttgttcgagaagatctcaggtaggcgtgagctagtgtcgctcttatcgtcagacaaagcaggccatggagaaggcatggcagcgggacacagtatgggattgaagaggggcagcgaatacacccgttggaaacccagacctggggctggaggggttgctggagagcgaggtaggactgtcggtcgggggccatggtggtcgatatttatggaaactcagggaagcagaacggtcaacagaggagccgaaaatggctcccctccgccagaaaattgactgagggtgaacgaggatggggccctacggcgacgaatggacatcggttaatcaatgggcccaggcaccaggcacgtccaacccgagcacaggtggcagtaaatggggttgtgcgtgggctttggtgcaagtgatgccaagaccgaccacggtgagcgagcggcttaaaacggcgtcaaaagcggccgtttttggcctcctgctcaccgtgtcatcgttaattggagtaataactgctattgctattattgatattttttttgtctgacttctaccttcttaggtttccttattaggtatcttagctattattttcttccttattagcttagaaagttcctatactagtagctttattagggtatctataatgttttttatttttaatgtgtcttaagtctaatgattccttctctaagtatatactgtaccttgatttttttctcttttctgtctttccgacggtatctgggcatactgttattgcttggtgctttgtccctttatctttatggagctatccatggtagtaattagatcatcattagtaacatcgtcggcaatatcttactcttgttgatcactccttttctccgtcatgtagacacctaggtatatcaacttttcaattgcgctaaaccggtaaaatcgaaaaagaaagagcaaagggggataatcagaacacgcgcaaaaaaaactttttcccccgagacaatactcgatgggtaaatcctgagacacgcgatcgctaatcatattcaacaaataatcgacgctttatccgtgcgagcagtatcgatccttgtcatcgaaatcccagtattgcgggacgcaatgggctcaagggtatcatcaccattcgcaagacgctcctctcgctcccattccaagcgctcagcctccttcatgatcttgagctcctgacagaacttgctgttcgctctgatgcggtcaccgtagcgaatgaaagcaaacggaattacagagacacccatactgaggaaggcaattagactgcaagcccaaggcacgccgagtcgattgaacatcggcttagcagcgagcggaagcaaggcacctagaatgcttcgtgtgcagcttgcggcggactgtgcgctagcggagagggtttcgtaggcgtcggtcaggtagttcagcatagccatgaaaattaacagatagcccattccgaaggggatgccggagaggaagggtacgacccagtgaatgtttggcgaggctgtccagcctatccagaagagggagatcacgtataggggtccgccgacgcaggcgagggggagtctgcggtattcctcgatgaaggcccagctggcgttgcgggccttcgctcgggctaggtagccatcgtaccagatgaagacgccacaggcaagcccggcgccgataccgactgttgtacagaaattagaatctacttcttttttgttggagaaatggcgtatggacgacaaacttactaggcagaaacatcaagccagatacaccagggctcattttgtagatacctgcagatttccgttagtgtttatgtccaacagggttctgcatacgctagcggggagaggtcgccgaccttggaagataattggatatgcctcaaagtagaggtagaagattgcgtatgccagagcaagatacaatgaactcagcgaaacgatatactcatgaataatcatgcggaatggtcgcgagatcgtgataagcagcatttctggcagattgcgactctggaggtccaatggcgatacgatgcttgaattgccggtatctttgcgtagcttgtgcgcacggcgcttcagaatgaccggggcataggtttcaggcatggcgataatcaatggcaaggtagcacccgagagaatgagtccgatccaaaaacaccaacgccagctgacaactgcaacgaagccagatacccaaggtccaatgattggcccaagggttgtacactgttaataaattagctgtcgagcccagaatctctagttggatgtatgcggcaagcttacagccatgaaataagccatcaggcgacctcgcagtgtgggatcgtcatgtacatcagcaaacaacccaccgacagtggcgataggcgccgacgcaaccatgccattgaatagtcggaatacaagcagagatgcatacgaatttgcgatagcgcacgctagcgtgaatatcatgaataagacaaaagagatgagcaaagggcccttccggccaaaatactcggagctaggaccccacagcaatggccctaaaatgtatccgacgagaaagacggagatgggcaagacgagagcggtttcgttggtgatgttgaactcttcggcaatttgggggatggcgttgctacaaatcgacgagccgatagtgctgttcatgacttgcatgacaccagctgagagaacaaggaacttcctcctctattaggcacatcagcaatcttttcttctccttgttttgtattggacaatatcccacataccgttctccagttgacggggttgtctgggtcattaagcccgaatgaaacaatcgttttggaagccactcggcggaatctagagtatgaagggttcccataacgttcttggatgggctcatgatcgacttctgagtcttggtcttcggagtcatgagagtcatgggagtcatgggagtgttgtgactcgtgagaggaagccactacgtgctctatacaacaatttcagcattttgaaattctaagatacaatgtagaaagcaccaacaaagagtataggcgactgacctcttgctgacatgaccttttgcacattttcctcgccagccacatggtccgacatcttgatggccttggcttatcaacaaagcgaaagtttggacgctaaatgaagatccaggcggattgcaagaattataaagagttcagaagttgaaaaagccacccccacagagtattagtggatgtttgactcagacaagtaaaaggtgtttaatgtgggttcaactccacattcatagagcaatctctgtggtacgccctaactttgacaaatcgagctgagacgcgagggtagtttagaaaatacagaaaagacaagccttccctgtcaaattaggtatttggtggtgttgatcagtagacctagatcgggtaggacggcttttctccaactgtttgggcaaaaaggcaggagccaagaagttgcggattgctaaagtggcaactagaattgtgactgtctgaaatatcaaattggacctcgcatagaagaccgattttcacacccttcacacgcgtcgcttgcgaaactacaaagggaatccaaacccacccatgtaaatcttgaagcaaatagctcgaccgcatgcgtctagtgatttggacattgaatcttctgtatgtaatgaagcgtgaagatcctgccgatcaattgattggtcttacattagcaattgcgtcagatagttttccctgtcaaggaagtgaggaccaatggggcaagctcgattttgggctgacgagcacttgttcccatgatatgcgtaatttgcatagacccgatcgagctacggctgatttttagtttgaagaagctccctgtagcggggacgccaatgctggggtcaacggggaacgggctattccgcacagcgtgggctcgacgtattttgttctcggagagaggttccgaaagcgctccacatagagtaaacgaacaatgccggttcaggggtatgccgtctttttcgatctgtgctgcgtatgccttgggcatcgaaggagtaatttcttgtgggttgggctgaggtcggcgaagttaaaagtgtcatttccggttgcgtgctgatgtgttcggcgacaaagccgatgtgccttgaccgcccaaaaatcatcagaagaagaatctggaagtgactcctgcagccaaaagcctctcgggtaatattctttcgaaagaaactgagtactgtgcatgagtggctgtcattattttgtcaaggggagtattggggttaatgcctgacgtaactgtcaccatattctgcctcaggcaccaaaccgttgtacacaggcgataaggcatcaccaggacccacaagtatccaagatttgtatagttattcacaggggagctaaatgtatgtaatatcatcgcttagatgcgtcttcgactttcaggaagcacaagtatctacagctgaccacaaggatattctgtcacataagctcttataggctgtatatgtcctcgttgctaaaatgaaaagactagttagtatttcaatgcctgatttctgaacataactgttcttgatgtatgaaatttacaaaggccgattgattcgattcctcccctccgcttgagaattaacccagacactgacactcatgctggccactgagaaaactccatagccgcagttattaatgagtaccgtctcattttgccagccaagaatatctgtccacaactccccggcatgtctgtgaccaacaaacatgcgcttggaggatgcgccaccgttgctaaggatacaggcaagactgaacgggtgtttatagttctcgtagcgcacgaatcctgtataatcgtaagaacaagcaatctacatccaaaaaagtgatactgaccaatgcagttccgtctattgaagtagtcccgttgtttcccgtgtgcatataactttcgcgcacgcgtgagtatgggaagcatttcgccgcatgtcccaggaggcttggatccacaattgattccatagaagtctccgtagaaaatgcatggctgcccttggcttcggaggaggattaaagagtatgcaagaggtttgaaaaatggtgcaatgatagtctgctggggtatttagttactatccacgccctaggatgtataatgctaaagctttggtctatctcacctctaatgaatgtccatcctgctagaggattgtaagctccatcatatcctcacaggacttcaacataccgtgtcatgatttccaacaaaagtctgacgtggtagtgatggttagtgggagtcctttctaccaaaataattgggtcttactactgcatgcgacggcatctgttctaccaacgtgcctttgaaaatattccgtagatcaccgcctgcgatcttcgagatagctgcaaactggcccaaaagtggcacatcgaacaacgagaccccataatccattaacttgagataccccagaagtagacccacctctcctctccagtactccgaaactaagaaataatcagcgccaacagtattgcgcaaatgtgtcaaattctttttggaaagacgcggaataatgctttactgcgtcgattcgcattccactggttggtaattcagtgccaatccactccccatttcattatatcagctcgaacttccgggtgggaatggtcgagatcggcgaacattaggtagtcgtagtttccatgctcatcactcacgtccttcgcccagtctttgttctgtcccagtatcttgtatattgcattctgctggctcgcatcgtcccagtccacaccagtaaagtgttgccagtgatacttcatggagctgtatttctccccacgtcccggaaagtcaaacccaacccaaccatcgatagtcagcggtcgagatatttcaatgttccgatctgcaagattgttgacctccatacgcgctctcatcttccatttgtcagcaggaatagaaatcaccttctgggtccatcttgacgactaagagattctcggttgaatctgccccagccttctggtttaaaacagcatcccagtaaatcccaatatccatatcctttgcagcccataccaatctctggaggtcctcctttggaccccatcgcgttgctctggtgcccttctggtcgaattccccaagatcatatagatcgtaaatatcatacccaattccagatgggtccatccctttacacccgggaggaatccagatattatcaactccgatgtctttcagatcggggattgccttgcggaggcgctgccaatggcgttgatcggctggcacgtgccattcaaacccctgcatcataagtgtgttttctgggggataccatagctgctttttatcaagtccgacaaaagagactggagaaccttcgatccctctccacttcttaggccttctccgaatcttcaaaaagcagcttaggaatgacagcatttgaccgagacttgcctctattgctgaaagtatggtattgatgtaatttggcctggttcttctccgcagcgtagggagaaggacaagaacatctagcaatcctcgactatatcatgttccccaaaagtcagggctgggcgaaactgacgagtgacactgacacaccctgctgtgcgatatacgttggctggtagaaattgaaacgcttactcgttgggttgaacgtcaaacgccgctctgtggaagatcacattaatgtttaaaccaacctcttcctcttcctggttcgtcggagtcttcttatggcacatttcaactatcctagtcttagaatatccacgccaatgtttaatgcgatgaatcagtgttatgcatagttgacgtgtagctacaatagatatatacaacatactgggtagggcaaggaagatatcggatcatgggaaccaggagtggcggtctgagagtaatgaagcgcctaaagcgcccaaccgtggaaggtgcaagattggagctcagaataaatgtcttggcggtgttgcgataacagtcacaaatggtcaatacgcgtgtccacagtggagatgtggctcgtgcgaggcaacaacgtgggggtcacctttgcggccaaccgacccttttcattattttatgcattcacagtcgtggagatcttgttctattgataaagctgtggatgctccatgtttcacgtctcacttctcaatttcctccatcatccgcttcgcgtcccatgctgccgttctctcttcttctccagtctcctccagctcgatcgtagccaactccccaaatctttccttccagaactgccacctctccttagaaaacccacattggcctttccagagcgggcctcctttacccagagcgccatcaaacccttcattccactggtagatgtctgccccgagaatactgatccacgcagcggcagcccgaatcaatgcttctactttccccggagagtattcgtgtgctggtgtttccagtgcctcgcgcagggtaatcaatgcaaaccaggagtatgcaaagacaggttctttggttgccatcaagcgtgccgtgaatttatcccggttgataatttgcgaaattgctttttgacgggcgtcaggaggtccatcaggtacgcctgcattccactcgtcccggaattgccagcctagcatgggtaggtctttccagacttgcatatcgtagagcacaatggagtccccatttgatttctttgcgtttgggagttttgatagttgaactagcacattgaccagtttatcgtggtgctcggggaaattgtatgcacacttgaagatcaagctccataggctggtaattcccccctcgaggtctgattcatctgccaaggagattgaagccagatgttcagcggcgtgctgtgcagatacactgtcgctgaataggtcttgtaggatagcaagccgagaggcaaaaatatcatctgtgatggcgaccattttgggagatggatcagaaatatgttttcgtatatgatgaaggggagtagtgatgttttaatattctgtttcaaattcgaggggctaattgtctcttatcatctgtgaatatggcctcgtggcctttatctgctgatctcattggttctgatttccaaggttgcatagcttttgacctatagtgctagttgataacctgagcacgctaatccaaggtcctacagtggggtttaaggccatcacaacatacggctttgaagtgccttgatttttttagaaataatttatgctgtcatacttgtatatacttcacagctcttactttgtatccaatcaatatttcacataccttcaatcatagttcagatagcatattaaaatgtgattatatcataacttacagaacaataattctccatgtacccatataactcatagctccaattgtatactccaatggccgcaatggccgcaaatatccaccctgacatgtcagctaatacgtgtccacagtgacgtagagggctgtggctggtaacaacattgaatcttccacctctgatagcgcaatgagttcgatatatgtacggagtagcatacagtgcaatatgcgctatacaaacagttcaattccatcaccacgagccttgaataaattcaatgtccagagccagcttggaaatgtgcctcctatcaaatccctttgcggttccttatcccgcctattcccggcaacgagctccaaccaccaaaatccacgtctaataatagccaatatcaacctcaagttggggtttgatgataatcaggatcaatataacaacatgcataacattcacccatccatgtagaaaagattagcaagacgctatacggttgaccgggcgatcggagttgagtgtgtggctgccgagcggctaccgcattggccgcgaaaagttttcgggttcggcggtcccatccctttgaaatcctttcttcttctcttcctctctctaaggcttcaattgaccattccatcctctcctctctttgacgttattctttacgttatctcacattaatcaaaatggctgtccctgtcgcccccaaggaggagatgagcgctctcaacctcgtatgttgcgaaccctgaaaataccaagctttaactgacccgattcttgcttccagtactcccgcttcgctttcgctggtgccgtctgctgcgctgtcacccacggtgctgccactcctctcgatgtgtaagtttttgaatctgtcgccggcgcgcgaagaagaatttccgctcatttccggtcctttacagcgtcaagacccgtatccagcttgaccccgtcacctacaaccgtggtatgctcggtggcttcaagcaggtcgtccagaacgagggtgctggcgctctcctgactggattcggtcccaccgccgccggttacttcctccagggtgccttcaagttcggtggatacgagttcttcaagcagcagtccatcaacgccgtcggctacgagactgccaagaacaaccgcaccgccgtctacctcgcctctgccggtgccgctgagttcattgctgatatcgctctgtgccctctcgaggctacccgtatccgtcttgtctcccagcctaccttcgccagcggtcttctccctgccatgacccgcatcctcaaggaggagggtatcggtgccttctactctggattcggacctatcctgttcaagcagtaagtttttttccctctgcccgcttcgggtatatatccgatgtaaatcccactaactcgatttcccacagggtcccctacaccatggccaagttcgtcgtcttcgagaaggtctccgaggccgtcctctcccgcgtcaacaaggagactctctccgacggtgccaagaccggtatcaacctcggctccggtctcgtcgctggtctcgccgccgccatcatctcccagcccgctgacaccatgctctccaagatcaacaagacccccggtgctcctggtgagggtaccgttacccgtctgatcaagatcgccaaggagctcggtatccgtggctcttacggtggtattggtgcccgtctcttcatggtcggctccatcaccgccggtcagttcgccatctacggtgacatcaagcgtatgctcggtgccactggcggtgttgagatcggtaaatagacgattcgagtctaatatgctcgggaggattgtagagactacccttagaattccttttgttttacgccttgtccatcccccacacacgatgtacaatattttgtctcagtttcctttcaagaacaagctcgcttttgttatatttacaataatttccatttcctcgtgaagtaaaagccttggtagtgataattgggttattgacgtctcgattgcgaaccgattggatttcaagaggccgattgagagatggcggaagtttgcgccgagactagcaatgagaattcagcgcgccatataagatttccctacggtcaatttcaaccgcctgttcactgcgctgagctattgacctccccggtgtgaccccgaaggaagggttcatttttgaatgagagctcggaaagtgcctgattagataacttcaacctctaggattgtccggatatagtatatatcccgaatctccttcttgataagatgtttcatacatatagatatcaagttgacggaggataagcagctccgactccagccgtgcggagggcagagcggggttgataagtatctccaacagtagatctataaattggtggacacccatttatcaaaagtgtaaactacctcattgcttccatctgaaacccacgcaactatgtcacaggaacaatacgagactttcaagcttggggattgggagctgcagagcggagagaagatcgaggatgctcatatcgcatacaagacattcggcgatccgaagtctccagctattgtctatccaacttggttttccggaggtatattcagatacgatcctttctctgccccaacactgctgatactgtctccagctctctccgataacttctggttgatcggagacgacaagctcctaaacccgaacaatttcttcatcatagtgccagccctattcggaaacggccagtcttcctctccatccaaccagccgagccctgggccattcccaaaggtgtcattttacgacaatgtgcgggcgcagtatgagcttgttaccaaacacctgggcatcaagcatttgcgcgccgttcttggctggtctatgggaggtgcccaggcattccagtgggcaacgcagtatcccgacttcatggatcttgtggttcccttttgcacggctgcgaaaacctcgctgcacaatcaggtctttctggaaggtgtcaagagctccttgattgcggtgaagaagagtcgatctgccgggtcgggagagattggccttaatagagagacggcggaagcgcattcttggacagctgaagagaaggatgttggcctcagggcattgggccgtgtgtatgctggatggtatgagattctgtgttgatttttgatttttatcccttatctgacacgttgaaaacaggggatttagccaggctttctatcgaggcaagttgtatgaaaccgtgttgggtttcaagggacttgaagacttcatggtcaacttctgggagaaatgggcttgttctaaaggttctgtttgatcccatcgaaccggttatatcggagaactgacaagtgctctacagaccctgaaaatctgttggttttgttgcagacctggcaaattggtgatgtctcgcagcaagatccatacaatggagactttgaaaaggcgatggcatctatcaacgcaaaagcgctggttttgccgtcaaaaaccgatctctacttcccgtgagttcatctcatatattctcccccttggtaaaagtgaggttaggctgagaattacatcatattaggcctgaggattcggagtacgaggttgcttgtatgaagccaggcattgggacactagatgtcttcccttcgatctggggtcgtgagtataccaatacaattacaagtagagaaggaactgacttgttttacagattgggcaggaggtccaggcgatagtgcgcaggatgttgaatggcttgataacaagctctctcaatttttcgcagagaacgaaggtggtagcgtgaattctctagccgggaagctccagaacacactttaataacaaagacacataatatgacatgttagcgttctgtcaatatggtttagtcatgaatgtgatctcttgaaatcgtaatgttctctcgtcgtcgccagaaaacagtagatatattgaccacgtgacgctgagtaagcgcctgccctggccctgcgaagcgccgatgaaccttgcgcagcgaccaacatccttcttcatttcatttctcttcgtttttctttcttttcttccggtttcgttcagagaattgtatttgttcccattgattgttctttttcattttcctagcagcatctaattccttcctgggctgcttacctcgggaaggctcgtcgaccttctccgctcgcgttatctaatcctccctattttcacacggcttgtgagactaaccttacaatctcgaattcctccccacaatggctacgccacctgtccgacagtggggtgttacacccccgatctcgaccgtcctgccgaccaaggacgagcttgcggcgaacgacgatctcatcgccgagctcaaggctcagaacaacttcgagctcccgactgaaacggaacggaggtgtgttcgcatctcaacaataaccgcaccagagctctggggctgacattgcggaatagaaaacaagtgctccagttactacagcgcgtcacagtggaattcgttcaagtcgtcagtcgcaagaagggtttgtctcctgctgctgttgaggcttctggcggtaaaattttcacgtatggaagttacagactgggtgtatacggaccaggtcagtgttcagctatgtatggatccaaactctcatgcccgtattaacgatggttgcttgcaggctccgatatcgatacactggtcgttggacctaagcatgtcctgattgatgatttcttcgctgaatttccccctattctccaaagaatggcttccgagggagccatcgaaaagatgacccctgtgcccgatgcgtttgttccaattatcaagcttgaattgtgtggaattagtatcgatctgatttttgcccgcctcgtcattcccgctatcccaatgaacctggatttgaagaataatgattacctcagaggactggatgaaagagaggtgcgatcgctaaatggaactcgtgtcacagatgaaatactggagctcgtccctcaacagaagacattccgtcttgcgttgcgtgcaatcaaactctgggcccagcgtaagcaccacttcctctctctgtaccgctattcaaattgtctaattatctttacaggacgagcgatttactcaaacattgtcggattccctggtggtgttgcatgggcgatgctggtggctcgagtttgtcaactatacccgcaagcaactggatctgttattgtggggaagtttttcagaatcatgaacaagtggaattggccccagcccgtcttattgaaacagatcgaggatggacctcttcagatcaaagtctggaacccaaaggtcagcacaaagcaccagtttcgctggcaatgtgggctaataacaacatcagatttatcatggtgatcgattccaccttatgcccatcatcactcctgcttatccctccatgtgcgcaacgcacaatatcagtatgtccaccaaggctgttattctcagagaactacagcgaggtggcgacatggtagacaagatcttcatgaagcagctctcgtggcaggatctattcacgcgccacacattcttcacccacgattacaaatactatctcagcatcaccgcttctagcaagaccaaggaggccgagtcggtgtggtcaggtctcgtggagtccaagctgcgtcacctcgttggcgctttggatcgaaagccaatagttgcagtggcccacccattcccgaagggatttgagagagttcatctcatcaagaacgagcaagagatggaagcagtcaagaatgggtctacacaatatcaggctaaaggcacaaagacggcgatgactgatgagactaaggatgctgctcaccaagccgcagtccagaataccctcgaaaatgcagaggttccaggaccggccgaggtcaaagtcgagggcacagtcgataatgatggcatgactgtctacacgacaacttattacatcggcctggagctgaaacctcttgagccaggtaatctcacccctgtccttgtatgacatttctaacttttttttttcttcaaaggccaatcgcgatctctggatatatcaaccgactcacagatcttcaagtcaacctgcacctcgtggccaggataccaggaagaagtcatggagttggctgtcacccatgttcgcaggtaagttcctctgtctgtgactcgtggatttttctaatgtcctctagctttgatttgcccgacgatgtcttccagcccggtgagacccgggcctctcgaccaaagaagaaagttaccaaacgctcagaaacggccggccaaaaacgcagcattggcgagttggacgtaagtgtatcgaagcgagtgagatcggcctaacctggcaaaccatcaaccttggaactcgtattccgacgccctgcgaaacaaaaccccggatgtcgacaataagaataactaataccaacttcgatttccagggtgcaaccgaaggacctgcgaaacgccaatttacctccgcaactcccgcctaaacaactccctgtatccccttcgcccctccatcccgccggggctggtccccaacaattgatatcagaaccacgaattgcttatggtctctgacctaatattgcagtttgaagttctacccatcaaccgaaccatctaactcctcgcatattcgaatgttacccttctctacagtgaacgtcccgtgctctcggagcataaggttggttcgttcttctcttctcttcgtcttttgtcttttgtcttttgcaacagctagactagacacccttcttctttctcgccctttggtgcctcacctcttactgggcatatttctcatggcgcatatgtgtatgggccggatttattcattatctcgtctatttggttggtgtagtatttcgttgtcggtggaatatgcggctttcctctgcccaggtgggcgtatccattcgccatcgtgcagatagttcaaatagtgaaatgcaaggacgtgtctcacaatatgtgggctacacataatccccaaactgtctacatcccagtaattttgctctcggctatttcccttcccttctggctctaacttgctggtattcaatcccgctactcttatgcgttcatttggcgcttcgctaaagtaattgagtgatattaccgttgatacagctaccattgaccactgctttatcttcccattggccattaggccatcttctaccggtatctggtaaagccatgctatatatggacgctcacagagtgcaagatatacagaatcttaatggaacatcttcgaagtcattccaagggagataaatgcattatagctttacgacaagaaaggtgtcattcgggaataataagtacaatggggagaaagaaaggagaacccatctacaacgagtgcatggttctgtgtggtgaaggaggaacttcctggaaggtgcggccaggaaagtacgaacagggcaggtgtgggcatgttcctcaattctcgccgcagcaagataaaagcaagacaaagcatggcatcgatttttgtgtgcctagagcatagatttcattttttgcccttttcaggcttgtcggctgagggtcgagtgcctgattttcttgtcgtacgcgtcttggttgcaggtcagtgtcaccgagcaaaaccaacactcggtctttgcatgctgttgctttcccacgtccaactcgtaggacacctatagcggggtttgctttaggtattgctgtggacattatcgccgacgttaagtcgcataggtcgaatgtagacgcgcaatgtattgtaccgcaatgccagggacacgatccagagagacatttcgcgtcggctgggtattttgcggcgtttggaggtgacatttaagctctgtcggctgcactccgacccttacaggtgtccattcttcgatgtcgcttatccgaattgctggctcgttttattccatctcggtatctgacggcagtgcgtacaaagctctcattccgaacctctctcccgtacttgctcatgttcattggggcttccatacttgaacatatccggagtgttaggcattttcgcaacgcatctatcccaggcaggagaaagactacacatgatgttcatagtctccatggataaacgtcacatgcggaagaaataaaaatgtgccacttttcattatgatcgtgacgagtcttttctcttgtggtagaaccagacccagacattcaagttttggcaagtcaccacgcaagttcatgttgggagggaaagtaggtattcaccaaattgtttgaacgccacaaagagaagtatgcccgagggtcacacacgacggcgccatacgggggccgactcctcgagccctgcgaacacaagacgagggacacagaggctttgaaacaggtgtttccaatagtcctccgactcgcgttgattgctcttgttccatctccaccatgctagagacaatttccccttcttccatcagcagtaagtgagtgttctggacatcaacagcatgacgcatcccacgactcccatatgtgatatagcgcttgatttatctcttgattttcctggcagacgtctccagtcgtcttcgccagtcagtttgaggcgaatagtccactccaccagaagctctcgtgttagagtcggtaaatatagccaatcgtctctcgggattgaaatgggtaattgtatttctattaatcgtccgaattcccttcttgacctcaatgattgcgaagattcttaccgtatcttggaccgcaaagctccgtccgcaagggtactttatgcttgtgaacttgcatataaagtgaatacggttgagtatccaattcaactttgggcgagtgaattgacagtgtttggagagaaggctttccgagtcatcgaagatatgctgtgttgtacttccgggacaatcgatgtatcactccgttaaaccccgtggagagggtgtaaaagagacgaatattttgagatggggattaaataggaagagggaagaacagaaaagagagagaacaggaaaacaaacgtgacctcaaaaatgcttcggtacgtaccttcccaatttggtctatacagtatacagtatatctgagaagagaaggaggagggaagaacagctgtgatattctcttcaataaatagcctatgggatcctagccaacaaagcaagacatcatcctcaaaattatttgctcaaactttcatatcctaagccctcttatagccatgatcgggctcactaggtagaagtttgatgtcgaagctgtggtgagaggtacagacgctactattttctcgattttctttagtcactgatgattctagattatattctacaatctctgaataaacttgaaggcattgctgtcccgatatcggcggcagacggtttaaaaatttgggaagccactgcgcgaatttatgaggagatgctgatggtaatcaaagtgagtgaagttgaggacattggggaattcgtaagagctcagatatgtttgaagaggacatttcaaggcctctctagttggatgaggaaaaaaaaagagatgctcacatgccgatttgaacgacagacctcgtgatggactagaaaagtactagtcacgcgctctaccaactgagctatgcgagctggttatgtgagcagggcggcggagggagaataacttcacacagtgttcaacttatcatctacattattacttctcgaggtcatatgataattattttggaaaaaggtgacaccagttaggtgatttccacctatatagtatgggactcatagtgattgagaaggtgattcctgtttgaaaggctatataatgaactgcgcgtaatatgaagcgtgggtggtgttagcgaaaatgcggatagtactgtagagggtggaaagtctaaggcggttgtgaaatggctgaaattgacgaactgttcttgtaagcatgcttgcccaggccacgagtgcgagaaaagctggacacttaaaggcaaagtttagagagatgttagcttaaaacgagtcatgacgctgagctaagtattgagcttggaagacgaaggtacgtgcaagtatggaatgttcaccgccttggcattaaccccttgttatagattgatctatggatctggaagccttcgtaccgccttttgatacgagtatactatatctttatcaagaaaggatatattataaacatcggataaactaatatctaaccagctcgcatagctcagttggtagagcgcgtgactagtacttttctagtccatcacgaggtctgtcgttcaaatcggcatgtgagcattttttgccttctccagctataaattttttacaatctgtaacggtgtctttttttttgctctctcccttcatttagccaatcttgataaccgcgaagtaaaacaagcgccaattggactgtgcacgggttagtaaattcatggctgctaccttttgagtaccgcgaggtctggaaaatgggaccttaacgtgcattgatgaatgtgtgtatatatgaggttattttagggttatgtctacgaaattttcatgcatgaggatgatttcgctcctccggactaaataaatccaattggccatctgatattgttcgaattgatctgatgcctaagagaatggactctgaaatcggcacgaaaaatgccgatgtagaatttttgagtgggtcctgccctaaaaaaatccgccgccccatatatcacagccagaccaaataaccatctaggccggctggcccaatggcaaggcgcttgactacgaatcattagatattagtttatccgatgtttataatatatcctttcttgataaagatatagtatactcgtatcaaaaggcggtacgaaggcttccagatccatagatcaatctataacaaggggttaatgccaaggcggtgaacattccatacttgcacgtaccttcgtcttccaagctcaatacttagctcagcgtcatgactcgttttaagctaacatctctctaaactttgcctttaagtgtccagcttttctcgcactcgtggcctgggcaagcatgcttacaagaacagttcgtcaatttcagccatttcacaaccgccttagactttccaccctctacagtactatccgcattttcgctaacaccacccacgcttcatattacgcgcagttcattatatagcctttcaaacaggaatcaccttctcaatcactatgagtcccatactatataggtggaaatcacctaactggtgtcacctttttccaaaataattatcatatgacctcgagaagtaataatgtagatgataagttgaacactgtgtgaagttattctccctccgccgccctgctcacataaccagctcgcatagctcagttggtagagcgcgtgactagtacttttctagtccatcacgaggtctgtcgttcaaatcggcatgtgagcattttttgccttctccagctataaattttttacaatctgtaacggtgtctttttttttgctctctcccttcatttagccaatcttgataaccgcgaagtaaaacaagcgccaattggactgtgcacgggttagtaaattcatggctgctaccttttgattannnnnnnnnnnnnnnnnnnnnnnnnnnnnnnnnnnnnnnnnnnnnnnnnnnnnnnnnnnnnnnnnnnnnnnnnnnnnnnnnnnnnnnnnnnnnnnnnnnnnnnnnnnnnnnnnnnnnnnnnnnnnnnnnnnnnnnnnnnnnnnnnnnnnnnnnnnnnnnnnnnnnnnnnnnnnnnnnnnnnnnnnnnnnnnnnnnnnnnnnnnnnnnnnnnnnnnnnnnnnnnnnnnnnnnnnnnnnnnnnnnnnnnnnnnnnnnnnnnnnnnnnnnnnnnnnnnnnnnnnnnnnnnnnnnnnnnnnnnnnnnnnnnnnnnnnnnnnnnnnnnnnnnnnnnnnnnnnnnnnnnnnnnnnnnnnnnnnnnnnnnnnnnnnnnnnnnnnnnnnnnnnnnnnnnnnnnnnnnnnnnnnnnnnnnnnnnnnnnnnnnnnnnnnnnnnnnnnnnnnnnnnnnnnnnnnnnnnnnnnnnnnnnnnnnnnnnnnnnnnnnnnnnnnnnnnnnnnnnnnnnnnnnnnnnnnnnnnnnnnnnnnnnnnnnnnnnnnnnnnnnnnnnnnnnnnnnnnnnggccggctggcccaatggcaaggcgcttgactacgaatcaagagattgcaggttcgatccctgcgtcggtcaatatttttgtcgttctgacgttctttttgctccattgttgtccagaatgtggccaaaaatggctgttgcactacatcgtacgatggtgtgtcgccgtatggttgagtggctcttagttttcagagtccacgggttgattgttgagttaccaagggagagtaagagtagaatttgaatattagaatttgatatatatttcagtatgtttacttcagatatgtgatatactaaattaaacgtaaatttgatactgcactacccggagcatgcaggttgatagtatgcttccctatagtagaacgtctagaaaacagtaaatcaaccacatggttagaatatcagactaaacatatgtcctgtcggtatacaaatgtctcatattggagccgagtggacatggcatgctaattttagcgttcgtttttagatgttggctaacgcataaccttgatttcattgtcctccaagttgttttaatgtttgtgataagtaaggcacgaaccgccttttatataccaggtgttaagcgggaccaaaccggcggtctttgtccaaagaaggtatgacttttattttaaaagtaaataataatggtcgcccgtcattgacatatttattggtaatagcagagctggtaagacatgatttcccactgatcagatttcacttgattgtttctcagtttgatctcactttcaagcaagcgatgtctcagtgattgatagaggcaggcttgctcatttataaatctataggagataatcgttagccaaggccactagcaatgagtgagagttccggatatcaacagcatgacgtataccattagagttcaaaaaccacctttgtatatactctcggagagcaattcttgattgagacatcccaacttcgactataagtgatggccacttactaacaagcgtagagtgagaatggacttcggaatcatactgatatccggttgctttgcgcagttgaacccggccacctctctagcactagtcgcccaccagcgccctgattgattcggtaaaccagcggcagacattgcatccccgaatgagtagtagagctggcaaacaacgcattcgtgctgcccgctaggcatgattattagtagtatgtttcgatcgtcaaagtaaatcgcactccactaatcctttcgcgaagaaggtgtttgcgtggggaaccgcccacgtcagctacggcttcagaggtaaaaggtattgagtttgatttgtttcttttggtccctctaagcattgattgtttgaggcttcttttgtcgaacgttcagtatcatcaggaatatgaaagtccgcttctgtaggttgaagctcgatgggggaatcgtgttcaattgtgatattagatgagttaaggcaaggcaagatgtagattcgaggagcagaggtgtttgcgttgctatctccgcctcaggggtacttttatggctatccatcacatggccgcttagttccatggatgtagtcttttatcttaaaggtatagagatagctcatatcgaaggttccctactaaagatattcggggatagtttgaaagccttagaaaagaccgatagaaagatgataatgaaatggttttataatagtgctagactttctctacagatgtacgaccgatctagatattatagtacaggacaaataaccgagggaaaaagttgaggctaggcctccacttatccaagcatatcagctttcaggacatctctcggcgtaaatattgtccagaaatgagacttttgccttttctcgttgtgctgaaacaatatccggactttttccgaattcatagggcactctgacctgacaacgaaatggcaggactaaatatttagctctattatgcatactggctatatgtagagattgatatagataaaaagtggatctggacaggacccctcgcgctccaccatctaactttgcaaaagaacaaacagaagattgtgcatctaataatctaggcaagtaaatctaaatgtaataagaaaatatataaaggaatgcaggtcaaaaacggctggtgcccacgcccttgaatcgacaagcccccacctttcagcaaaggataatcggtatctagaaatctcgggagcgcgttccgacctcgaggaactgctctataaaaccactgccggtccgcgtggaccagggagataaacttcctttaaacaaccatctaagtcccaaaagcttccccagctctaacacccacacccacaacatggaaattccacagcccctcgaggccccaggcccaatcagaccaataacctgcgtcgaaatgcacacagcaggcgagccaacgcgaatcatctgggatggaaccccgcctttgacaggtaccctgctagaacaacgagcgcaagcaaaagcccaattcgacgaattccgccgcgttctcatactcgagccgcgcggccactacgacatgtacggtgcgatcctacgcccggagaccgagctcgtcgcgtccggagaagcccatataggcgttctgttcatgcacaacgaagggttctcgactatgtgcggacatgcgacgatcgcgctgggccggttccttgtcgacgttgacgagaaggtatttcctcgtcggagggaattgaaatttgaccctgtgtcccggacgacgacgcttaatcttcatgtgccatgtggcgtggtcgaggttactgttcccacgttggattctgggaaatcggatgcgtcgcggcctgtttcgttcgtgtctgtgccgtcgtttgctactgctatttcctttcaggtccctgtgcctgagaagtatcgctgggctgagcttgctggcagggcttctgttacggcggactttgcttatgggggtgcgtactatggtatgattagtgctgaggaattgggcttccctggtggacttggggagattaagttgcaggatatggaccatgcgacaaagttgctcaaagaggctgtggttacgaatccagacttgcgatatctcatccaggatgttcggactgctgaggagggattcttgtacgggattatgatcactgatacgcgactgggacatgttagtgcttcagaggggacggcggctgctcgtgcgcagttagatgctagcagtgaggagacagggctctgtttctttgcgaaccagcagattgaccggtcacccactggaagctgtgtggctgcgagggtggctctcgcacatgccaaagggactttgccggcgggtgagaagaggatttataattccctggtgactcgtgcatacagaggtattcctggatttgttgggtctgtctttgatgatgctggcacaagtggaggagaccaacagagtgttcgagtctgtgtcgagggatatgcgtattataccggatatcattcctttgtggtagagaaggaggatggcctcggggtggatggattctctgtgagggacattgcactatagtggctatttgaagcagcgaattcaatatttgggtctgtgtttgtcttatttgaacttaaatagcggtgctttttgccgcctttgcccaccaaatagaataccatatataaagttagaaattcaagtttcattcttgatagtcaaatacttcatgcctaaactctctattgatctatttcatatagctaaggctctgggttgaaacataaccctaaaattgcggtctcgggatctccatggcttccgtggttcgaccatacgagataccacctagacgactgataggcttaagaaccttcaaatcgacaagattcctttcctcgttaatagcgtcatcccgaacccaaaaacgaacgccctcaatgatagcaagcacacccgatttcttaccgggggtgacccgactctcaaactccttcaactcaacaagcttgccctcgatagaaagaatggactccttgacacgagcaggctttacaacagaggtaggcgcctggtgcagccccgaaatctcccactcggagacaccataaggggcattgatagaagtcgagttggccgcttcaaggaaatgctcggagatgatattgataacacactccccagtctcattcaagttcctcaatgagtccttggctttctccatggacccagaaaagccaactgtgaacagcggcgggtcgtggttgatgacctgcgcgtagctgaatggggcgagattggtagtcttgccatctgcagactgcgtactgacgagtgcgatcggtcgcgggaccattcctgagatcaggaacttatagttggaggccacgggacggccctcttcattggggtcgatctcgacgtggtccttcttcagactcgcgccgtcgtcgttcgcgccatcgccttgcttccatgtggggtttggagacttggtgtatgtgatctcggcatcgcggcgaaaatctggccgcgaggcttgggttttctcgaaatcggggccgactttgagcattgtgcaggtgtggctgaagaattgagcggggtgattgggttgaaatggtgcgcggggtgttgcgagatcagcacttgagattataaatcagccatgcggttcagtatgggttgccccgcgaagtgttgacgatgagggtcacctccgtcatgctcgctagaaagtgagggcagtcaaatacttactacaattgcaagaatgagagcctccgagtatttcgggaggcagatttaagtagaaacatggggaatatggggcagctctttgattccaagaaattcttatcgcatttactatcaagcttcggctgcagcttagtgccacggatggggctgccgcggacttgtattgccacgcactatatcacttcctctaccgactatcgggccgactccggggatatcgccggggaacctttgcccctggagaaaaaccgagtcacgtcatgtgtacaaggtctgtttcaggattatgggtgaccgtaaagttgtgtattattacatgtatacaggacattcgaaaatttgcaagtattaatggcataaatcagcaaatgaatccatagtattggtattactgacctaaacccacaactgcgggattttgtttctttgatcctgaactgtccacaggaaatggccggctaaaagcaccgttcacctgaccttctagaaactgatgtggagcctgtcggtaaatactatattcttcggtctgttggggagatttccctgtttgagatctggaataagcttaaatctacttaaataaccttggaatgaacgatcaaccgtttcagataccgagtacctatacggagaatatatacacgtagtgttgctaaaagggtctatacttggaaacgtgggggagtgaaatacgggtccccagtccccaacccacttctccccataaaagctccatctgccccaaagcctggatcctcggagttgatgcgatgaatttcaatgttttgatcctattttagtcattcaagttcatgagcgtcaggcatattatattccgtcttcgctttattctttaaagatggtatttctaccccaaaaagtaaagtgattacagtataggtatataaaacacaagggatcgcctcgtcccatgaccgattgctcccgaacggggatggcgtggctatttccggcatagcggtcaaaggggggaaactgactccgatgttttcgaatcagaacattaccttacacaaatacatcgtgagatttccaaaagtttcggaaatgtaaactgtgctagaaagagtggcgtagtacaagcgaaggaaatcacgaggccttatcaactcccctcttccccaacttttctcccttgaacacttcacacatactttttgctcccctattagcctggaacattggccaccgttgatttcctcctaatgaagctttcgccatttgacaccttccctacttcatccgtccgatcctcgtcctccctgaaccttaggatccaagatccgcgccgagaatcccccgacgcgctcaagctgaagctgggagtgtgcaggtacccaatgggtcgaggccacggataattattggctcgccatgagcctcccttctcccaagaagaagaacggcggcattccttctgttcccagacaaatccgctttgttgccacagatgggcagccccaaaccaagcggcgccgcgttaatgccgcgtaagtgggcctcatatagttcacggacataacttcgaggaccaagacactgacgtcacttttgttttattcagttgcttaacatgtcgtcggcgcaagattcgatgttcaggtgaacaaccaggtaggatggacggggcgtctcgattgtggatatcttgctgacgggtatatgagggaagtatgtaagacttgctccgactacaagcatacctgcctcggatataccgagtcgaccgcacaccggcgaacgcagtccgactccgcatctcgagcgccgcccatttccgcaccgaatgaattgagccaacccgctgcccgggcagtcgaaagtagctcccccgaaccagtgtcaacaacgatagccaagccctctgcggataagccgaatgcgaaaccgcccggatcaaaggaagtttattcctgggatacttctgcgaacaaggacttggatacacaggctgttggggacagtccggcgagtggtcgtacctctgtgagctcggggggtcgtacacacgtcccgtattttcgatacttcggccctactgcgattgtaccggggtttaaacaaatggttgtgcaagtccgaggttctcgcaagagtaacccgtccacgtcctcagaatctctctctcctctcaggagccctaaactgtccgatattcacacaaaacccctggctactgccgcggataatcgggacagtcgcgatgcgaatatcccattttatgaccgagatgatgcacttccggtttcgaatattgtatcccatttgtgcgagctgttctttgcccacctcggttgcagctttcctttcctacagcgagagagatttctccaggacctcaaggagaagaaggtcgacaccatgttggtagatgcagtgtgctcgttagctgctagattctcaatacacccatcacttgatcctccacaggctcctcctatcgatcgttcgcagccgccactcgacgataaaaagtgggaccgtggcctgccatttggtcatcgcgcgatgagcggtctcgtggattcactgccatgtccaaccctttctgccgtccaagcctgcttattactcgcttatgaacaattcggatcaaatcacgacagtggactgtggatgtaccttggaatatccattcgcatggcacaggaccttggactgcagaagttgcaaggcctcaaacataattatggcaagaccggcgtcacaccgagtgaagtgatgacaggtcacgcggggaaactaagagaggaacagtatgatgatctggatgtgcatctgacacccaagactacctcacagactttggttgaggaacgtgcccgggagcgcgaacgggtagactcgttctggagcatctttttcctagacagagtcatctcttcgggtactgggaggccagtgacactgcgcgatgaggatattgaactctgtttccctcttcaatctgaatctcagctaccaaatgggtggcccgcgcctttcccaccacttattcggatcattcatctgtacggccgggtgaccgacctcattaatggcattcaggatgtcaacctcgtcacacctgatacgttgaagatgctggctgggatggaaagcgacctgaccggcatctatcaacacttgtcccccagacttcatttcaacgcagccaatttccaggcctatgtcaaagccaaggagggaactaatttcattcttctccatttttggttccatactctcatagttctccttcaccaaccgacgttgttgaactcatttggtggatcaatccaacatctctacccgaatagtcgtgagttgtcgatgtcatctgccaaaaccattgccgatatcttatccttctcggaacttgtcgatgggaaaagcttcattggcaatcctttcacgagtcagccgatgtacattgcggcgtgcgcattcctcatggaaagtgcttactatgcgtcctcatcctcgggagctgagtcgcaacaacctcagccactgttggcgaatcaatccagtgggttcgtgatgcccgctatagagtcatcgaacgggacagaacgaaagtctatggcgaagcatatcttgcttgcttctgccgccaaagagaactatcagcggtgttataaggccttgaaagcactcaatacatattgggaaggcactgggtatattttgacagtgctggatcagaaggccaaggggattgtcgaccctctcctttacgccgtggaggagatggaaattacccaaggtatcgcccctgggcaaccgcctgggccaggagcttggtgtgcgggcaatgcaccgacggattctgtctttgatccagaaagaccagccggggtcgcggatatctcatctgatgggaaatggtcaccacacattgacccaagtcaaggtttgtgagattcgttgatatttatgataaatatagcactaacaacttatatcttgacagctatcggatgggcactcacaggagcaacaaattcttcacagcccaacttgagtctactctatcagatgtccacgaccgaggccgagtcttcgcccaatagaccaacatactcgtcgcagtacagtcacagctacccagtcctaccgacgaatgccggcgaggggccaagctcttcatatgcgcaatctattgcacccgccaggactcacgaagaaatgacaccctcactcaagacaaatgctaaataccccaatgttcacgccagaacaactagcaccgacgcctcttattacatgggcatgaattcgacctatcccgaatcaaacatgcggacaacacgccccgtacagacaacacaatctacttttcccgggatgctcccccccgggctaccaacttcacatatggatacccaaccctccgcatataattactcgataccccaagcaacatccgatctccagccgggaatggacgatgccaacgggatgatgatcgggagtcatgaggtcgatatgaactccattaaccagcaagactctttgccgttcgttaacggcgagatccttccgtggttggaatacctccctcaagatgtcctcagtttcttcggcgaccatcaaaattatccgctcatgagtcctgacgatgtgtcacgacctccgtaatgttcttttcgtatatatttatctgcttgaggcgatttgcattcgcctttgttccagcgattagcttctgcttttgtttatatatttccgaccgagatgggggttttttggcgtcatgttggatgatatccttgccagcaatagatccctcttttggttgtgtatgttcaaaccggcatgtttgacttggaggagttgggttcaagtccatttccaatagactaaaaaaagtttctttgcaaattgatttctttgagatcctaacagacggtataaacccacgataaccttggaagttccacgttcaatacaacttacgatgtacgagtatattgtgtggcttgacgatcgacatgtcagtggttgcccggaacaacggggcggtgagcgactgtcaacatacgttggagtgtcttgaatttcgcgttcacacaaaggggaatatgtggaatttggttttaccaagtccctagattcttttgttatcacagacagcgctcgaaagtctcagaacgcatcctcccgccagccattacatgagaatctcatggcgcagttgaatgacgacagtcaacaaaacatcaattgcacagagatcctgagcccacaaccattcactcctccaagcaaaggcttccttatatcctccctcgagtccgagccctcccttgccgataatgcccagatgtcctcaacccaagaccatgaatacagctcctcctcgtcccgtcattcaacaagcgacgtcttcggccacgaaatggacgatgagctagaccaactgaaatccagagcctcgagtcgctcatcactagcttcgaccccagcctccgtcctcatccacccagtcgacagaacgaataaaatgccagagatggacatcaacgaaaagatagccggctacagaatggaggagtccgagttcggcgacttcaatgacagccccgctaacaaccgcaccatccgccagcgcgaagccgccttccgaaaaccgagttccgtccgggcgatgcaaatgcacacagaagatgaagccgatgacgatgattatataacgcccccgcgacgacgacaaggcctccggtcacggtcgcccggcccctccccattgagacgatcaccgtattactcgcccaatgcaccgaaacagccgaagcccaagagggaggctcccctcgtgctgctacactgcaccttgctcccgccgtccatcccagtacctggggcatcggacccgaggaaccaggatatcctcgaagaagagctaccggcgcaatactggaggcgctggcggcggctgcaagaccgggtgggatcgagcgtgctgcgcgatcgtggcgtgctgatctcgcacccggaggacctgtacgatatcctagaggagcggctgttggagagcctcgagctgaaacggccacgtcttcagaacgggcacttcgtgggacaggacgacaatgactctagctctggctccgatggggaattctcggatatcggagagagcgagacggacggcgagcagggggatgagtgtcccgactgtgggaagcatgtgcggcatggagatagtaatcgtaaatgggagattcaggtatttgccgcgaatggattgatgcgcgctggggcatgggctgctgcgtggcgcgatatggagaaggttgatgtcgaggtagggctttggttgccctctgatattcgcgataatttggagaggaggcttgcagagaagcagatggcagctgtggagcaggcgaatagtcagataccgcagatgtcgccgtcggttgatggtagacagcaggtcccaccggagtttttgcagtcgcctaggcatggccatgcccgcatggtcagtgatacggggtctttcacgacgtctgatgatatgactttcaggcaggctttcccggaagctggagctcgtctcgaccaaacgcctgaacttgggctggagaagaaggaacatgaacctgctctttcgaccctcctcatcaattacatccgtgttctggcggccgataagcgcaaccttgccctgcttgttctcagtgtccttgtggtttttcttgctatcggttcccgccagcaacaagtccacgtctactcccatttttcacaaggctcggctcatgagatcctgccctcctcggctgtgccgaatttgagcgcggctccatctcttattccttctgtttttataccgaattccgacttttcgacgtctgatatagtggagtctgcttctctgactgttgactctcttgatcctcatgcgcaggctccacttgaggaggatgaaaattcttcttctttgtctgatgtccccgttgagttttctgtgccgttcgagctcatggagcctacccggactacgcaacttccccttgggggcaacccagagactcctttggatgacactgtggactctactgctatgcctctagagtcctctccttcttccactgactctatcgagtctcccgttttgttagatgagactgcccagtctgataatcatggcgaagaagaagagctcgaaaaagacgaaaaaacagattgatccactttctcaaccttacgaccacgacaggaacgatatcaggcgatatgtttggcattttgatgatttttacaatgttcctctccattttgatgtcttttgctgatttagccatagccatagcccctcgttagttcagctttatgattctccttatattagcgaacctcatctggtttttcagatttataaattgtatgttcactcaatgatatcggccgtaaacgcttttttcaaatgatatgatccagttggatcgatagtagtagaagtctttctttggatatttttttctggatatcttttcctgggatgacataaaatgccttaaatctttttatgaaacaatgccaagtctagactttgatatctccactttgcccccaggtcctcccgctcgcttagtgatcgtccctctccaatagattagctatttgacagatattggatatcagatctgtggattatgcatagaacgtgtggagacaatgcacgaaaccttcaaactggttcttccatgtaacctgtgtccacatcttattctaaaggcgacctgtcctcacgatgcggggcaatctctacttgttacatcccacaatgtacaccagaaagcagaaagcagaaagcaaaatggaaaactgattcaaggctcgatattattgattatcgattaaaggtaaggttagttgaacgagttcgattttgtattgggcaggttcaagtgtcactggcccagcgaatttatccgtcaacccagcataagtcacaaccttcgtaaaaaagtgctaatcacgtccagaccttcgtaagcttcgtgacaggaacatctagtagccgccgccgtaaccaccttggccgccttgctggccaccgtagccgccctgaccaccaccgtaaccgccctgaccaccgccgtagccaccctggccaccaccgtagcctccgttgccgccaccacggtaaccgccgccgccgaagccgccgccgcgaccaccaccgccaccggcagcgcgctcagtagccttgtcaacacggatctggcgaccgtcgaacctgaaagaagtggttgttagtagatgttctgacgggaagtagatgtcgcgctggaacaggcgacgcccatgatgcgcgactgtcccaggacgacttgacttgaccagtcgcttaaagcggaggagaggagatatgggattagcttgcttactcctggttgttcatggcgttcatagcggcagtagcctcatcgtcggtggagtaacgaacgaaaccgaaaccacggctgcgaccagtatcacggtccttgacgacggtctagaaagaaaatggacattagagttgggcaatcagtgatggaagtcagagcgactcacagcatcctcaacaacgccgaattcctcgaagcgctggcgcagactgttgtcgtctgtgttccaggaaagaccgctagaaaatgagggtcagcaggcgcatgttatatcttcactagggtcagtcttacccaatgaaaagcttcgacattttgatggaaatggggtggagagagatcgagagagagggggaaagggtgttagtgtgaagaggggcacagccgagcctgatcttaaatacaacccgggacggaacaacatcaccccacagattcctgattcctggtttttcaggcgcgttttttattttgttttgttttgttttgattttgcgatttggcggtttgacgtgcgtttggcttggattatggcgtctgtgagacctgacttatgtatacttgtttgggtaatctgtttacctgtattgtcgctttgtcatacatagtggacccgtctccccacgctgtcaggagtctagattcctacactacttgcacctcatccaacagacgtatgcaacaatggcaccatttgaaataatatccagtgtggatgttgtagaacaagtgaccaagagcaaaagtaccgtatcgaaaactatatttagaatcctccttcctatgtgttctcgttatgaggtcataccatcccatctagatcaccccacccccggacgttctatataaaatcttctttctcctccacccaaccttgattctacaaccaacttacaactcatactctcaactcctcatctcaactcaatcatcaatatgcctgtcattgaaatcaccaggtaagtctctcccttacacaaacaaacacaaacacaaactaataccctacagcagagccgagttcctacaaaagatcctcggctcaccagaccccgtcgtcctcgactgctacgccgaatggtgctcacactgcaaagccatcgaaccgaaaattgaagaattgagcaacctctacaccccagtgaaattctaccaggtggatgtcgacaaaatcgaggatgttggccaggagctaggtgtgcgggctaagccgacattcatgctatttaaggacggagagaagattacagagattgttggggctcatttgcctgctgttgagcagggcattaaaactcatctcctttgagggcggttctttttttttatccaccgaggtgcttgtgcttgtgggatacatgcctccagtcatctgctaagctggtcttgttataatgttggcatgtcatcgatcagacagctgcttatccgatcatgttttaatggatacggctcttttatcaaagagggattctcaactatgttttattctagagtgcattcatacagatattgctcgaacattcggcatcccattatcccgtgtacaaccactcaatacactgtgcaacctacagcaaataccaaagtaaacatcacaccaaggcgtcagaaagcccacctatatacttccccaaatctatcccatatacctcatctagacactagaacccagcagcaatagaataattcgcagggataacaggccaagcatcaaccccatccaacatcgccaagaccatccccccactctgatgaacctgaatatgacaatgcaacaagaaagccccgggattaacaacatgatacctgatcgccgtccaactcaagcccgtgacagccggaagcgtatgaaaagtatcccgatactggggcgtctgcaaattaaagttaccaggaacagcctgtaccgcttccgcgaccgagccccaactaaaagtaccattcccctgaccgataatgaaatgcttattcgaatgcttgtggatcggatgcgggggctggaggatggtatccgtctgaagaatcaagtcgatccaggtattattcttcgttcggacgatcaagtcgccgggaatagagttctggttgaagagcaatggctgtgcttcctcgagctcgaggccgtagctggaattaccgagtctccagcggtaggcgacgccgacttggttgatgtgcaggaagaaggtttgtgcgatattgtttgacgggacgagcgctgggaacgggacgacgatggactcgttaaggaagacggtgtctgtcctggcggctgcgttgttgatttggatccacgggttggatggccgggttagctgcgacacgccttggtatcgcattattgccgtcgtgttcaggaactggtttatgctggcgctgaccatgcgcacggcgtagtctccggctggctgggtgagggggatcagaaccgagtatcggtttgagtttggaacggtgactgcgttgactttgagaggctcgatgtatcgtccgtctatggcgtatacccacatgtcgtgttcgtcgactgagaaggtgagctctagcaggccggctgtgctaatgagatcccagctcacgtattggttggctgcgttgacagtaaataattcttggggaccttgtgacggtacgcagccttcgaacatggttggggggatggcagcgtagttgtgtgggaagttgaacaccgtttcagtgatattaggagggaagcatctagtgatatagttagtctttgccgggatcatcaaagtactcattagacaaccactcacgccatatctgttagtttaagaccatcacccaaggacgttttctggacaggtgtcgtcagggcatcaatctcagcacgtggcagacaagtgatggaccctttgccattgatgagtaaagcattggcacagaatgcgtctgtgccagacgcaatctcagcagcccatatctcctccgacgtgaggacacgccattcagaaagcaaaacgggagaggtcacgatctccgcacggatcatagccctcagctgagcgggatcggttgtgataagactgaagggcttttgcaccgaggctgcaggggtgatatagatcggtccgtaaaggccgtcttcgagagagccgcggtgatgggcatgataccagtaggctccgtactcggttgcagtccatttatacaggaatgaggtgttcggtgtgatggatctctgagagacacccgggactccatcagaccaaggagttcccagctgttcaattcctatagaattcattagtatggatatgcaaatcagctcaagccatcgaagagcttaccatggaagtgtatagttgtattgaacgggcaccggttatcaacgaggaactcaacattgtccccctggttgatccgcagcgggggaccaggaaactgcccgtttgtcaaaatcacttgcctagacactcctgcgacagttctgttagaccatgtcaaggtaactggaaagaaaactgtagccgcatgtgtccattggacgaggcacagagcccaaagggacaggctgaacttcatatctaaagataacactagactgaaaatcactatcagatcgaacctgctcttgatgtcccatgctttttatgggattcccacccttttatgccggcccagggagagtcatggagcattgagtgagcatatgcatctcgcagctcttatgtgggtctatcacatcagatgcaggattctcatgggcgagtcttcttgcgagctcgtataggcgcaaataaatggaataagccatctacttctgtcgggaactaatctaacttctcggggaataggcgggggcgaagttcatccgagaattagtagattgatcttgggtcttgaagcctgtttcgcagctaagccaatgactaaaggctaaattaggtcgcaatcttcgatctgaagcaagggacgcgattgggaacagcaggctgactcctggcgaatgaaggactcaaagttcaagataccccggtagtcccaaacaatagcttggcggtgctgcagggatgaatctgtaatgaaggtgttggcactgcttgtgtgtaagcatagccctaagcgggcagattcaagacaggaatcctttgggatttggcacgttgctgatgtggtgtatccgggatgaatggcgcatgctgggcacaaagtttccacagccgtgggagagtctgacttggggtcagagttccggtaacctacatgttacacggatgagaatgaatatcactagtctgatcaaagaactgccggtctcggtcgtcatcgtactatgattcaaccagtcataaatcagctttcatcgaaaaagagtcggtgtaatcctcatcccgacttaggagccacgtgctgaaactgaatcaaggtacgcaattttcaggatgaaacgaaagccttaggtgagggaggttatagaaggaagatgggggcagttggattccaaactgaaccacccgccacaaaggtgacgtgtggaagctgcctggatgcagctgagatctaaaacaggagaaggaaatggaaaacgccaattgatttgtgatattcgaaaacatgattaatatccaagtcatatgctatcaacaaggaagattgtaacaattttgtgaagttaacttttcttgccatgtatgatacggcatgggggaagtaaatagccgccaaagacattaatagttgccatcgacaaagtagcctggcatgtcatcatgggtgtcattcgatgcaggagggtggcccgctttggaattgaaaatagcaaccgggtttgaagcagacaactcactcccacgagacggggagatgggctgaccaagtgagcctttcgttgaccatccttgttcttcggaaattttttgaccatcggcgccatctagatgcaagccttccaaaccatcaggattgatttcactgtagctgtcgttcagtcgttgtaggaattctgggtcaaatcccatttgtaccaaagggtcagctgtgctttctcccagcacagacgcagtggttggaagactactagcccaatccgtggagaaggatggatcaggaccagctgacatcatccctgcactaccagcgtaactgcctgatatactccccggtcggctgggcccagcagaagaaaagccagtgccaggaaagccgtggctgcgaagactagggctagagactgccgggctgtggatggcggccccttggcatactgttcgcgctagcatattgatctcccggggtggagctcggaggccgccattgatagcgaatggaggctgcatgcctagatcggcaaattggatgctgtcgttgttcacaggagtctccaatccacagtcacgctttaggacacccagccaaacaatattatctgcgcaggtctggttccagggatcgtcacatccatagatgacgcgacgagcttccgcttgtatcatctgatctgacggaacatgaccttgtgccttttggtcatttatgtatgcagtgagtgcgcgagaaagccgatggtaacaattgatatccgtaggaacgggaagcataagtgtgctaccatcccctttagcatgctcagtgccccagggatcaggagaccgccattcgtagtcaatcatgtacggcggaatggcgttttcgacgcgagcttggatctgtgggtcaaagccccagtccccttgccattgagccatgctagctccatgtttgaaatgaccggccaaatggtctactcgatctttccatgtgtggaagagggaaccacagaatccacagcgggagttgatatctgtaatgctgctttgccatttctccatgcagggttggaacttggcattgtgcatcaagcggaggtgttggttgagatgatccttgcggtaaaatgtcctctcttgcactgtcttctcttggcaggtgacgaaactgtgagtttcaaggtgttcatcgtctggattagctgccaagcaaaagacacaaacaggtataccgtcctgttcaattgcaccgccgtgaggggagcatgtccatttgtccaagataagatgtatggacttctcgtgccgctgccagtcatacttagcagggaaggagtcggtacaaaaggtacactggaaaggacgagcagctttggcctttgaatgggccagagtattgacaggcaccgaggccttgcggcggcggcgacggtctttccggtccattgacccaaaggaaagagaagatcgatgggagaatgcagaagcaaaagagagatcagaaatggatgaatcaaaactactggcggaggcagcgcacagtttatgttcagagctagcatggcttgactcattgttactagaacgggccctcacgtgactcgatggagcctggcgtggacgggagggatcgaatgggggattggccagggcacgggtaatatcgctgatcgtagccggttcgttttcggggggagagtacttccaacgttcaaggggagtcatgagggatacgttgacggattgcttcatggggatgtccacagctcctggaacaggagaactgctcccaggcgacgcacgaactttgccgcgtcgcctggcattggcgagccaattggcgatttgcgtccgagtcagatcagtgtgttgtttcaggtcatccctctcttgctcggtaggatacgggttctcgtcgtgatctctcagccagcccttcaggatgctgattgccttgcgcgagaaccgagcaccagttttctgagagcgtgcatctgggtcattggaatgtgtattgtatgagactgatttgagggctttccttccggtcaagctgcctgtaggaacataggcattctctgacacgctatgtaatgtctggaggaacttgcccggcgttttggcgtgagtgaaactgcattcacgccaaagagagatacagcatgtacaaccatagttcattataccgcgctttgcaacaaaacaatccaatcccattcgtcggcagaagtcgcacggctcctgagcccggtcgacagggtcaatggcttgtccgacattcacttcggactgctccggtaccgggtcattggagaactccaatggccgatcatgaaccatcgagttgaaatttgctgcctgttcttcgggttcgtcgagttcaatatcaatcgaagcaacatcgtcgtctaattgattagagccatgggcagacgaggcgccctcgaaatcgaaatactccatgttgcgaacgattctaaagggaaatgctgcacaggggacagcctttcaggaccagagtaagggaacaataaagaacacggttcaaagcagaagaggagtcggtcagaagagaaaatagtacccttccaaggttcgtccggggtagagagatgagtgagtaatcaattctggtggagctccgtgaccttggaaccagaggtgggcaccattcacttggaccgctcaaaggcaaatcccgtgtggcttttttttttcacgataagcatgatggtcatgaggaataaggccgaaacacatgcttgggtatccacctcatatcgcaggctccgatgacaatacggagtggaagaaattaatttgagaggaaggaagtccacactgagtgggcggagaaaggcttcgggtggagaatccgagtgaaaaaggaccaaaatggatgcatcggcgcgccctttggatgacaacgctaagcctatttaggttaagctccgtcgagttggggtcgttgcccagccccggtgattcatctcttcgcgatatcggacgtcggctttcttttttatatctgtgttgtgtaaaaggtatactgtttctatagtagcagcgataataaaatagttcacgtggattattatagccgttagatccatgcagctttcctcatgtaaacaacggatcgtcttccaaaggtctgaagctagcttacaatacatgcacacctattggtttgaatttccttcggcgtcggagaagtcgaaacctgttgcctcatgtagatggtttctgtatattctctcgatgcatttggatatgccgccgtaaaatcaacttgtctccattcaagaccataaataccaaagaagatacaatgtgtgatacacgatgattgtacaaaagagaggaaaaagacggagaatgttgttttatatggggaaaatgataattgatggctctaggcagtgaacttggaagaagctgagaagtgacattatcggttttctattgcgctcgtattctagtatagtgacacatcgagccctccatttcaaaatgagagattcgatagattcaggtgtttttttcaatgatgagaacaaaatctaatatttagtagatgattgtttgtcatgactggtataggaagcggcataccttgacgtagatgatttcgcaatatatcgtatgtttcatcgtcgaactcagcctgaagcgatctcaatcttggtaaacgggaaatgattctgaacgcagtttctggcgcaatattccgatatacaacagtcctgatctcgagttcacaaattatatcgattggcggtagcgtgtccgcgttctccgcaagctcaagaaaagaatgttcatatctccgatggagtaagtcatcactcatccagtaaaacttgcattccatatcgcttcatccttccttcatcatcgggattcgctagccagtcactcggagactgagcacataggagtagataaatccgactcctatcttctggccactccttcaaagctccccagagggctgtcaacgcggctgtaaacacctggttgttctgaacggatcggtttcattttcacaagcggcgcgggctagaatatcgtattctggaagtgcaatattgaactcaaggcgtgtgacgttgacctgccgctgtctggattaacttgagggtgcatagcctaaaagaccgagtatgcgacggaaatccgggagtcgagaaggagtgagacatagaatagagaaggtttcccgctcgatgacagccagccatgtcttgcagacggttgcgtacaaggccaaactatcttcttttgggaggaaagaaaagattcgggtaagattttcggggggaagataaggagtcatgttggaaccgtatcaatctccagagggaattacgcgtgaacggtttgccacgcctctcttggaagaaattattcgaaggccggattcctgtttgtctgttgtttcatcagatgtagatcatatgagaagatgatgaatagaatggggtaggtaaccagaagccataaagtgcaagaactttgatactggaaccgaggaatcaaaggcatgttagatgatggcggtcaacaaagatgacttagatatacgggctacctagctaggcagcctgtttgtcagtctaatgaaggacgcggctgtctgcttctctccctactgattcttcatgtatgcgttgagccaaggctagcgtgtaaaaacgaatggtgcaggctctgaggatttgactgaattagcgagagatgcccatataaaatagatcaggctatacttgtatataacatctacagaagatgtataaagatctacaacttcccttttgggttaaagcatttggtggggccttttctccaaagataacagttttgaggggaaattgaacctcgtcagaatctggcaatgttctaaatttcgatgatcggtaattcaacgggtgtttcaatgtccgaatctcatttgaaccagagcatttatacctgaattgcccccaatttgattgagaaaacctccttctcgttatcttagaatgaagcagggaatcgactttcaagagcgcgatttgcctcacatcgcaccatctgagtcagaccgtgaccaataccccgaaggtggattgaaggcatggtctgtggttcttggggcttggtgtgccatgattccgtccatggggctcttaaacagcctgggagccctacaaccttggacaagtacccaccaactccgggattattcggagtcgagtattggctggatctatggaacctacacatttttcctcttcttggggggtgcacaatttggtaatcgtcttcccaccatattgaatgcaatctgaactaacgagcacctcaggcgcaattcttgattcccatggacctctatatgtggtgctcccgggctctattgggatagtactttcgttgattttcttgagcttcagtcatggtgtgttcccaatatctattcgtgtttctcccctatcgtattaccttcactgcgaattcacacatccctacgcaagaaacaaagtctgactctaaataagagtattatcaaatatttctgtcattcagcgttctcggcggaatatcagctggcacacttttcacacctccgctggcggctgttggccattggttcaatgttcgacgtggctgggcaactggggtagcctgcacagcgggaggcattgggggttgcatatttcccttgataattctttttgcagctcctcgcatcggttttgcgtgggcaattcgcataatcgcgctggtatgtgtagtgacatgctcaattgcatgtctcacggtccgcaccagactcccttccaagaaagcagtcacatccatcgacttcagggctctcaaagatatcaaatacgcatccgtcacgctgagtgtctttcttgctgaatttgcggcttttattccaatcacatacatcacgtcctacacacttcatgccggattcgatgaacagatgtcatatgcggttcttgtctttctgaatcttggtgctgtgttcggacgattcctcccgggactggtcgctgatcggttgggtcgatttaacgtcatgatcgtgagttgcttaatgtgttctctgttcactctcatcctttggctttccgaggatctggtcgaccccgacagcttgggaattgtcattggctacgctgtgcttttcggcttctggagtgggtcagctatcagtattgcaccagtttgcgtttctcaggtctgtgaaatccaagattatgggaagagagttggaactacatggacgatagtcagctttggtaccctcgtcgctatccctattgcaggcgctattcagcagcacaacaatggggagttctatgggctgattatttttgggggtgttctctatatttcctgcacaattgcgtttatcgtgtctcgtggcatttgcaagggatggggttgggggataagattttagacacggggaaattatatattggcctacgacatacccggcctacaatcatgtcttatggaaaagtcattttgaattagacattcttcattggagcggataatagattatattcagagataaatcaaattgattgaagtctttaggccttgaaatcgacaagaggaaagccagtttgtaatcgtaagctcttgaccttgtgtagtaacgaaatcattcagagacacatggcaacgagcctacagtatgatcacagcaatatttatcaacagccataataaactcatccttcgtcatctgaccacgatcgagacaggccttgagttcctcgaccttttcgacccttgtcatactcatccaggtctcgaagcttgtcacacacaaagtctttcacctctggtctaatttgcagctcactaacacgtttcatccaccactcgaaaccgataaattgccgccacttcatgtaaggaaagccgagtggattgaaaaacccactaaaaagaagcatatgaacccatatggctcctgaagtctcggaccatttaacatgctcggagagttccttgtattgactttttggccttttctcttcttcctttaccaaagcttcattaaatatgcgaagacaatcgaaataatgttctgtagccaccggggcgtggtcactgttttcgattttccactcatcattgaccggtcgatcatgaagaagccaccaaggagctgatccgaagagctgcgctggtcctgcataaacccactcaaggtccacgactctgacagttgtgagatcgctatcgcttttcatgatcatgtttgctggggtaaaatcgtcgcagatgaatctaaatgggccattatcatccgccgtgttgacaaattgtggtattaacgattccaaaatactcaatggagtatatttggattaaacgtctagttcggcaatggctgaatttggttgatgtcgaagtgaaagacatgctagtccagactaaaatgtcagaccgcctatttgagcagtacccttagacaatgaacacgacgtgaccccatacaaacagcatatcccgcccacaaaccctcacagtacgactcaatagccggcttccactatctcgcctcacaaatttcgacgccaaaggagagagcgtggaaaaatttacacaaaataagattaaaggaaggagaagggggctaggtagtcactacgagtcacaaggggtgcagacactgctgaagggctcgaatcgggatattcatctagactacaagatgcttatgagggaggtccggtcgaatggacagggagacattatcattatacaacagatgttgcgtatatgctgtgaagaagtcggggagaaccacggctgagacttgaccttgctttcgtccagtggatagtgcctggcacctggcatactgagacgagatatcgagttacgcacttactgattggttttcacgtcggaccaaaccatagaatggcagccgttggtcgattagctttcctttgtaatattaatatggtaacaagtcatttctttccaaagacgtattccatcggtgtaagtgtaagtctagcgacactattgaatgccctcactttacatttaccataggcttacctttaattgtaagatgtgcaatgccaagaatgtggtcagttaataactagtagcggctttaaattcagccccaaaactcctgtttgggtaaaatatcacatgtctgccacgtcatcagtgcttgattgataatacaatattgtacaaagtactttattgtaaaaagtacttttaacgatctctatctgtaattatttaatatacaacttagcatcaccaattctggatagctccaaacaagattatgccgatcgacaaatccaaaccctacatacccctagccggcggcgcagatgacggttggtctcacgagcaccaagcgacagctacatgctactgtggcgccatacaacttgcctttgtatgtatagcgcatactcaataccaaggatcgcgaatttaacattaacggggaactatagccaaccgacggtcccggcctagttgacacattcctttgccactgtacagactgccgcaaaatcactgcatcgatgttcgcatccaacttcatagttgcagactcccatctggtacacctgcgcggccgggaaaatcttaaatcctacagccagtctcgaacaatcgcttccggcaaaacaatgaccaacttcttctgttcaacatgtggttcgcttatgtatcgtgtcggcgaggcatacccgggacatagcattcttcgtattggaacggtggatgattttaacttacatgagactaagttgaggccgagggttgagcagtatacaaaggatcgggttgggtggttacatggtgtggagggttttgagcaggctagagggacggcttatggttcggatgtaaaagttggcttggatttggggcatacagataagacggacgttgtgtaacactgtaagaatgaaatccaaactccatcaaataagagtcatccgatacggtgtaagtcgaggcgtagaatcgcgttgagttctcgtctgcgtatgattattagtcatatcggtttctaaaggtacctaaatgtataccgcctttccacaccgctctatagttacagctcccgtattgaagctattcccaccatacaaatctctaaaataccccgtgtataggcgttgaggcctctcagaccattctcaacaatttcatatacatatcctcatctttgatcccacattttccccctacatctcacctggaaacattggtctcttgaaatctgcaaattgtctggtcttgaagagatggcatctgctaattaccctagactacaagtcagaacttcacgttgtatatttttggtagcaattccacatattatttgcctttttgaagcgtaatgatcatgatatctgcaccactcgtttggtccggcgtgaggacccgactggcgtcatttttaatatcccagtatgatgctggtgatagagtttctgctggcgtcaaactcgaagtcccttgtattggaacaagcaatagtcgctttgtggggttttcgattcttgcaggcacaatgaagtggaaaacggtgcagtcatagacctaaataataatcctttagaaattatgttgagaatggtaacaaggggatgtcgtcagacgtacttgataaccttgactttccatatccactttcatctctctgccctcagacagaagtcgatactgctacccaaaatgacactctttcatgcgatctggagtgttgctctggatgatgttcctcatcctcaccacgatctcgttcgcactgtcccatagctgttcgcccgccatcggtgccactcagacagacagtaacggaaggtgcggcaactttgcacggctttacaaccttgtaaagccaaaagatttaatgactcctgttattattgagagatcacgaggtccaaaggcggggctgtcataacaaggtgcccgaaaatcacatgataatctgtctaatccccaaaacgaatttgatatgacaataatccacacacctttggtacacagatgtggaaaatgtactattcaaattattggcaacgcgatgagaaaggggcacagtggatagcgagacaaagaagggtctagcgctgttgtacccataacactgaagacgagaacctgaaaaaaaggtgccatcttgtcatcgacgacgattgattggcaagtgcatcgctcctcaacgatcctttgccgctccactcgagtgggtcgaacccgcccttccggatgtttattttgataccaagagatagggcatctacttttgctcacattgtagcccatactaacccgaagaagtgctcataaaagtgacagggtgggaatttccctattcaatgcaaaaatcatctgttcagcaagtagaatcggttgtgtcgagataagtgagaaattgcatagagtttgcatagagtttgaataacgttcttgttgcattgttcccgatagctttagaagttcaaggccgaaaggcacctcttcggttcaaacatggatgcataaatttgaagaaatcaaattcatggatatgcttttgttgacttgtaagcgggtgtttgaaggccactgactatatgaccatagagataattctagggtggttttaggtagaaattgatgacaaggtttgtgttggtcaagcaggaacaaaactgttgtagcattagaacggcaaagcattctgtgatccgtggcgcactcgagaaattctggcagatcctccggatatgggccgatgaaaaatgaaccaattctagcaggcgttggttccgtctcaatgtctagattgagacaaaaattgaaaagtacaaacctttattaggcgcgacgaagataaagtgaaagctagcctatctgaaagaaacaagaatgaacatgggtctataacagctacgcgaagcgatgtaatatataagattagtgtcggtctgtaaagacgtaagtagatctacaagagcctgcaggcttcactgcgcatgaaaacgctttagtaaaaattcggccagattggcatatcgtccctggctcacatcttgctgagccagaatctgctcggccacatcatgcccccaaacaaactcggaatgaaagttgcgcagttcggatagacgctgacggagccacctttgatgtgttatatcattggtttcaattaccgccatcaatagcggccagtgtaaacgcctgaggagctttggatcagataaaaattgtttttggcaaatgtcaatgatccctgctgtagcttgttggtgaatgcctagcggtaaagaatcgacacagagaagccggcggtggaaaaggacctggccgtagaaggtagaaacggccatgtatatggtgttaagcgtgcgtcgagcggaaacgctgccggcaaattttgcagtgataaaaaggtcagagaatttctggccacaatcagcatgtcactcgacatctagagggaggttatctatactgacttctcgtgtggcgaggatctcacggaaaaggggttctgtggagttggcggcaccagccgcggattcgacgaggaccttccaagtgcgatggcgtaggcaaaatccggcatgcaatagctctagagctctataattttcaatgtcgtctagaacttcctcctcgggatactgctcgccccagaagcatcggccccaaagacgagcacatcgataaaggtggtccggctgcaaagcgggattcccagactgggccacatagtcgttaagtgactcggtaagaccaatgggacgacagctagcatcgatatatctgttcatttgttagtcgtagtcgtttttttgttgaccgctggggatgaatcacagaatccataacaaaaactgctcgggaatgaaggagaccttggccatggtcacggtatcaccggtcaatgtgtcgactccgggagagaagaacatatcattaacatctttaattcgaaatagttgtggatgtgtttccagaagtgaacgcacgccctgcaggtggaattgaagctggattcccattagccgactaatagtgaacacagccaggacacaagattcttacatggcgtactgagtgtccgaactgccactcccatgctatcatcaagaatacagtggcaaaaaccgtctcgacatcttccaatgaaacctggcgcggcgtctcaagtaattgcctgaattctttaaccgcttggctgtaatggtactgaccatggtcctgagagcgcataagcagcccattgcgatgcatatcagatgcacttaacgccaatatcatccgcattattactctattcgatgcggccgggccttcgtagagatggctaattttgatcagttagccggttgaattttattgtaagccatttcgcacacgcatgaaagcctcaccataagccgctccaattccatctcttcatgtagtaaaatacgagtgaggaggaaggaaagtactggaaatattgttgatcgagagaggtgagtgtcaatgaattggcgcacgcgacattgacgttcaaggaagggtatatggggggcgaaattggcgctacgttgaatgtgtcaagacaaacgtccgatgtccaagagatcggcgagagacttgtggaaagggcatctggttggaactcgacaaggtcctcggctttaggtattgaagaggcttgttcggaggttccgggtgcaggttcaaggtgacgaattcgcgtgcttcgtccatgtttcactggtatcccccattcgcaatttaggcgcaaggatgagcatcttgcacaaactggtttctcctcaccgcatttgaccttgcgacggcggcaggtactacaacctagcaagaagtgggttagtcgcgatgtagatgaggtaaaagtaatgtcctaccactcttggaacgtggtccattacgcccaaaaccctgcatggacatgaaccagcagggatcaacctacagacatgagcgaaaagaccgaagagagcgaattgaaagaagtaataatgaaagggtgtcgggacattggaagaattcagtgccgaggccgataagataacgcggggaaggctgagtcatcatggcgttgctccgactatttcccttttcggatgtctatcgggaattcacgttcttatgccgactcttacgacttcaattcggtcgcaaatgatgaaacattaatacaccaaaaacttcgatagtgaaaaaataaatgggctttacaaccattggagtgctatgtactaaaaatgcatatactcctcccgcataatctcgtttttccattggcgccgcgccacatcatacatatcattctccacaatcatatcccaaccgatcaatgccagtgattttccaacaatcaatgcctcggcatgagcttcatctgttccagctgcagctgcaaacgtcggatgatgtggaaacgaagttggcggagccggaatcgcaaacattgtgtgaagcgtgggggtctcgtaacttacatttcctattatggaagtacatgggtcagctatatcaactaaaggttctatagggtttagataccaatgtcagacgacgctgttaggaccttgtcatggcgcttgagaacattgcgaccatactgtcccatgtgaacctggtagcgttcacagagagtatcattcaatcggacatcggtataaagttcatcccttgaagcaagcatgttagtgaccagttcatcaaatacggctaaatgggttcatactcatcaatcttgacttgacaaccggtggccaaggcaccggcctcaatgcaattacgcaatttaccgatgagagtattcaatcctttcaaggtagggctgcgtacttgccagaaagctttcgtataagccggtatcacgttgactaccttgggtgtatccaagaaagcacaatgaacacgttgatccggaagaagctgctgtcgaagaaccgcaacgttgttataagacgagaccagagcatcaagcgcgttgatcccttcccaagggtttccaccggcatgggcattcctgcccgtgaattcgcctagatatttatcagcatgggatacaaaaatcagaattggagcgactcacagtaaatattcttgcgggcattcatcgacgttccagctatgccatcagatggctcttggtcaggataaatctttttgggtccagggtgactgcaagtaaagtcagcacataatgttctaaaaatactaagatgtatcttacgccattagcgagatgtcaacattcttgtaagcgccggcatcaatcaatttggcctttccgcctccactttcctcagccggagtgcctaacagctgggttctaccagggataccaaatttctttatggcaaacgacagcgcaaggaacgcagcaatactgcttgtcgctatcagattgtgaccacaggcatggccaattccaggcaatgcgtcatattctgcgttgaaattgatcaaccgtccatcagttccactcaaaacctcaaaggaggtatctagaccataggcgtggcgagtaacactaaagccttgtccttcgaggaagtcacaaatcgtatcgtgggcgcggtgctcctggtaagcaagctctgggtttgaccagatctgggaatgatcaccaacatgttagccttgcagataaaatggtgaccgtagggactaacgtacttgataattcaattcccgcaattcctgctctagttccttgagcgaggcatccacagaagtcttcacttcctcgatattgatggtcgtaacagtcatagtgatttaactatatttttcaattcgagccgtgtaaaattggaatccgccttagaaaaaggttcagtgtataattcctgttgggatatgagcaactttcaacccggattgaaacttgatcaaatagtatccgggtggcgtttgccaatataagaggggaaggcgatgccgaacgatatgtcgcattgtcctatcgccaatgtgacaatggaggtagtagtcacgaaattacgcctatcatttgccacaaacttcgtagcctaattttacctaacactatgcctctttaccattttcgccgttgttgtctttgactctttatcgggggctgtatggaaagtgggttgccgatgaacatgggcatccacattgccgacgaggcaatatgattcgttggactgccgatatggtaatgccaatattttgcgcctcacgaagtctatccaaactctagtatctggctacaattaagacctacatggatcttatctcggcatccaaagccacatatagtcatctctgtttgccgtccagtcttcccgtgttcattgcgaacgatgtggtttccgtgtggtttccccgcctattcttgcagtaaaaccagctcttatcaacgtaatattgactggacagctcatgaaaatcattggtctggttccctatcagctattccggtatcttgtgagtcgccatcggcttggcctcactgccctgaagtcatatagccctctaggacgcccgcaaattggttaataaaatctgatatcaacaatatttcttcctcttttctcacctgccatctacctatcttcttctctactcatttagtttagtcagtatgggacaacaagacctcccatccgaaagtataaaaccagaccttggaattctcaaggttgagtcgatttctgctgctcgagatgtcgatcttggacagctgtttgaggttgaaacaacaccagaaatggagaagaaggttttgagaaagctagacttctttttgattcctcttatgggcggttgctacatgctgcagtacattgacaaactagccattagtcaggcgacccttttcaatcttcgacaggacttggtatttcccctttcaattcagtcttttttgtcttcgatactaatatgcttccttttcactagggcttgaaaggcaatgaatataactgggcatcagccatcttttattttggatatttcgcatggagttggccgagttcatatctggtcgtgaggtacgtttgagagatgatgcataataacatatactaattatgaatcctaggcttcctttgggcaaatatctcagttgtgctgtttgtgtttggggaggttgtgtgatgtgtcacgccgcttgcacaaactgggctggtttaatggcagcgagattcttcttaggcattggaggtaggagttcctctaccaataaattccaatttggctaatgagtgcattttgacagaggcatcgattgctcctggctttgcactgataacgggaatgttttatacaagagcggagcagccagcaagacaagcagcatggtttattggtaattctattgctgttctccttggtggactgattgcctacggcattggcaatatccacggcacggctgttgcccaatggcaactgttgtttcttgtcttaggcgccatcacttctctctatggcgtcctcttattctttacactaccggactcacccgcgaaggctgtctttcttaagccaaacgaacaagcgatcgccgtccacagaactttgaagaacaagactggagttttggacacgggaaagttccaatggggtcaggttttaatggcggtaaaagacctacaaacatggtttttggtgctttatacactgtgtgtcaacttctgcaatggtggcctcacaagtttttctgctatcattatcaccggatttggattcccccatttagaggctcttctcatccagatgcctattggtggcgcccagcttgtcttcctcatccttacttcgggcattgcctccctcgttccaaagtctcgcattattatgatgatggtcaatacttcagtgtcgatggtgggtatgattttaattttgaagctagatagtgataatcaagcagggaagatgaccggtctctgcctcggtggtgtcttcgctgccaatatcccgctgtcgctcagtttgattagttcgaatgtcgctggatttaccaagaagagcactgtcagtgccctcatgttcgcggcatattgcgttggaaatatcgttggaccccagttcttcatcccctcggaagaaccttcatatctggtcagtacttcactctcatgatctgtccttacccagaagtgctgacttgataagaccggtattaaagcatctatggctggactggcctttggaatcttcttcttggcctgtctctatctgttttatgtctcggaaaaccgtcgacgggataggctgtacgggtctcctgtggagatgaccgagaccgaagaactgcaagacgagctatctaacaaaaccgatcacgagatcgaaagttttcgatatgtgctttgagatatttcacttcgacatgaatttgtccggggatatgaagcacatttctgctgtcttcatgcgtcctgtgattttgctcttttgtatcccactgtgtgccagacgagcaagtattttccaacagggcccttggcaaagtcattagagaaatactagcgcgaaaagatcagcaggatctacattgacagaattgttatggatgggagtacttcgatcgatataaaaggtctctcgccttcgccgcaaatagagattacgagtacataaaaatataggatttgtttcctttgaattctgatataagggcccagagctagctaaacaataaaaagcaacatgacacagagcaataaccttttctcggtgtgaaatttctagccaaatgaacatatgcaaactcattttcctggtaggatggttgctccggaaggtggttatttgacgatttcgtatgttttcgctgctttccatttttcgaatgcaaatgcttccaagcctgcatggcttactgccacaaaccgggattgtagtcccggaactctccttctagaacgctcggtagacgaatctggcccttccaagagatgccaggatgccggtactcgctcccagacattagagactgtcgctccagtccaaaagttcactttagattgccagtcctggccagccaaatctatcttaaccaaaggccggaagtcttgaaaatcagaatgacgccatctgagccagcatattccatggcatgcttgaacgagtagttggtatagaaaccaggcctaaactcgtggtcaaaggtttttggagagatatgaagtgtgaggaatgcggccaggctagccactgcccggcgggataaacccttaaaaagaagattaccatcttcagggtatcttggtgagttctgggtggggttgttggaggattgctgtcagcagcgaagtcatctgacaacgaaggtgtggtatggtcaggtaatccagctggttggtggttctcggccaggcgggatacgttacgtgccaagtcgaactggaaagaaagagtgcattcagacaagatactaaacgtggagaaagaaaggaaagaagaacaggacgcagagctacagtgtcgtccttatatccccaggggcaaagccctatcctcgcttacttggtgaggaaggaacgagtccagcaagtgccaatcgtagaagcaagttgcaaagtgggaagcagcccattgatatagctgccactttacaaacaatgcgaacctcgaacctcctcgcttagctattcaacaaacaacctatttatcaagcagtaacaatgcgaacagtaagcgagcaagcaaatatgaagcatgtgatagcgatccatgtggatcgtgacactggtactgcaaagttcagtcatagatccaaactccctctgtaacatgacattcccttgattatcttcagcacattgcagactaatgtattaggaatttccattttcatttttatcaatgaccctatagctttagaaattcaagtttttgctccccatttaggaggtcagttacacaatttggtaaccgtccagaccgaagctccataacgattacagagatgcctaaggggaagttcaaagctatatttctgatatctataatacaataggcatggcctctatctataagggttctaattaagagatccccattcaactggcctgagtgtaaaccgtatcgtcggtgacagcttctgctggcagccacttcccggcaacggtgtttttgtacgtgagttgggcgagtgtaaaagtgtgaagctcggacaccagaaccgtcttcttcaggggcaagatgcggtgtaccatggcgttttgagtaagcatcgagatgtactcttcgtcggctacggatttcatcgaggcgtcaaaggtcacgcggatcaaggcatcgggcgagtctgtgctaagcagcgacgtagataagagccacaaggctgggccggccgcagtcgatgcatcggcaatgtgcagtaggccagcgttggtgccgagcagcgggtgcttgagcgtgaaaaactccattgtgccagaggctccaatgtggccgaaagtgccggtgccaccagtggcattgccagcgagagtgaaccacacaccactcaaaggaccggtagcggaaatcatcccgacggcgttgttgccgacgctgggcgggatgggcatctgattcgtctcgccgctggtagtattgatgcgcaggatggacgagtcattgtcttgtgtaacatagatcaaaccagtggacggttcctccttgataaacaccgggctgttgagtgcaggatacagtatgtagtccttggcattgtggatatccgcagagaacacatagtagttgccattttgctcggatgccaccttaagaccggcccagacgcggttgccgatctcaaacacacaatgcgggccgttacccggcgccgggatattaatagtcttcttgatgatcggtgcagtcgagagtttcttgccgggatccacaagcagtagcttgttttcgccctgcagtgacaaccacatcatgccggggtatatcgttgatggccacacgccatggagcatggaggtagtgctgttctttcccatggggaacgagtggtaagcaattggctcctcggtggttgcatccaactcgatcttgataagattgctgtcagagatctgcgtcaacaagacgaaattcgagttcggcacatgtgcaaactcatgcgtctgagtggcgacaggcataagatactcggtgaggcggcggctcacaagcgaatgagaggaactctgtgccaacacggtgctggcgctgagcgccagcccgattacgagagacttgcaagcagagaaaaacatattcgaaatgccccgcttgacgttatcggggcttcaaatgttgatgtgttcgcacatgggaaaaagcactcatcttatattcactgcttccaaggttgtcagcttgtcagctcatcagcttggcagcttggcagctcagttttctcctccacatcttgcactagtgatttacatagtagttgaatagtctagcctactttataatttcttctctcctatcaatcaaccaattaaaaatcataatttcaccacaatgaggcaattcggaatctgcggtaaaattgggtagaaagccagcttaagtcgcccgcgagtactccgtaccttggaatgttgacttcagatcccaacctcgaagcggccgaccgaagaagttaaatgaccgtactattcattatgaacgccgagtatcttgctcgagtattccgtgggccttcattatgtgtggaataaagtcttggtgggcctggaattggctttattggtagtattttcattccgtccaagcttgcgggtacctgaaatctcttgcagcgccctacaaggtactcagtatagctcagaaaaatcacgcacaaccctttggctggtatatagccgtcttaccacccccatacctgtaccaggtatgggtctgtcccacataacgagagtttctcacaaaacgagagatttctctttttaagtatctttaatatggcatacccatacaaaaggtacatataccccatatcatgttctcaaccctttggctagttaaaggagaaataagagtataaatcaataataaatttatagttaaattaattggctaataaaagaagtttcagatatcttatatagaaaagtaaagaccatatttatgaaagagatgtatatagaaacatcaacgttctaccacttggagaatactcaatatttcatcctaatatattaatagtaaataaaatagacctcctttagactatatatcccctactatatcttttgtaagtattcctagaagtgacaaaatctctattttatgttcatgtaccttttgtatgggtataccatataaaagatactgtcaagaatgggccctaaacaagaaccttggtttttgttatggtctagtggtaaattacgctgtacgaaattcaacagatacctaaaaagagaaatctctcgttttgtgagaaactctcgttatgtgggacagacccaccctagttaactcagggtgggatggtaagacggctatatggcaagctgctactaagtatgtgctctagctggttacaagcttcgcaaattgaagggataacccatatacatcgccggttcagtataggcgatttgtttatatattgtaaaccgaaccatagtgaccgaacacaaggaatttaaggtaaaagctatccattagtggagttgttcctgaccctccaaatttcaggattggcttaccaactctgcaagaaaggtattgaaagggaataagagccggatgttgagaatgttcgacatgtaagtatcgtaaccgagagccactcattctccgcagtatagagtctctccaagtcaagaacataagcagttaccgagcagataatgctagagcatgccgtatgcacaacactcccaaaatggcaagcagtaatttatccgggaaggagcccttctcaaaagccttatgttctgattgggtttgtatagaaccacgcacgggtacacacaaagccaagtgcgctaagcccaaagggccaaaactaaactacattagtcctctgccacaggtccactttgcccttggctcatgtagccaataatatgtccttccttcatccaatatctgtaagtcgaggtgacggcggaaacaccacgaatgtgcgtggttttgcagtgcacgtctagcacagctacccgcctaacgacacggtatagatacagagtgaccttacccgattcggtttagcgtgactttccatgctctcatagtatggcgggtccatcatgagggaagtcggtgctataagagggaagtcggtgctataagagggaaggctcatatgttcaaccaggagtctatgcagtcgaatgcctgttcccttgattactattataaggcacgataggtagcacggcaaacaacaacacacatcaatgacacttgttttcagatcaaaggaattcagtgaatttcctcaaagacccgaacaatgaatgatttccccttgataaccaccttctcccctgggatcctccatgcgccaataccctctccatcaaacccatctttgattgatggtacgtcacctgcatcagggccgatgacatatttctcctcccatccagaaccccactcttcccttctcgcactaacttcacctccggacctcttgagagaccaggcaccggcctgatccttctggccggaatgtgtctgagtctgctggagtgccaagtaggttccccagatccgtcccaagaagaccttggtcacagtcacctctttttgctcaccaacggccagaggagcatcatctgactccagaatccaggagattcctttcttcgctccttcaggaccctccttgaagagcagctcttgccaaacttcttcaaaagccgtcatgggctcaccgggcagatccgcccggggcatctctccgcactcgaggtcggtaccatcggcctggggactgaagttgccaatatccacgataccgatctcattcagggagtccaactcgcgcgtgaagagcaccttgactgtttcttgtcagtgaccttcaatcaaaaggtatttccgacaagtaatttcagggcaacgaacgtggaatttctttgggattctcctcaattctagtaccggccattgcccagtcaatggcgccggatttcttatccattcgcaaatccacgaaccattctcccacagaaagaacaatggtatcagtcgtctcctcaggaatttcaggaacccatcggagtgaaagacgggttgagaaaccgcaaattgatcctagttgagcacccgtggcagacattgtgtatgtgaagtggtttgtggtttgaatgttcacctggccagtctaattataatcaataatcttatcacaatcgccgaggcaggactcggtaagtaacaccagttgagtttcgcatctcaatctaactgtcgcctgaagttcctgcatcaatcaccccccccgctgccccagcttacgtaacccggatgttcgccgaatcggggattttgaagcgattcaacgattggcgatggagaacggtggggtgattcaactaatggtgttatctaatgcacttcgagttcattggaccgctgtcgttgtaagtgattgagccaataactgcattccaaagcataaatcggttatcaaaatgtctcgaagagtttcgggccattagcttccagcgaaatgtatcaatgatttgcgtttttgctatttagtatctgataaactagaggttctttactatcttctgtcaaatatagagccatctaagataagctcgattggcactccacaccaatatcaccatcaattccatcacaagtaatcactgatggggtacacttgccggacgaggtgccatgaatattctcgaacttgatgttcgtgaaattgacagcggatgggtactcggcgcaagtggtgctgttaatgttgaagtaatattggtcaaggacaatgggactatcggtatttctaacgtgaatgtccttagaggtgatattgttgatacgaccgaagccgacgtcggggccagcctaggccttagctccggtctgtgtcatatcagcgagtgcattattgagaaacagaattataactatcttacctagctgttcaggatagtaacattctcgatccaggcgttcttaatgatatcctcgacgccagagtacttctaatacttcctatactcatgccgtcggtgttattgtaccgcggggttctacacgaaaatattggcatgtagtataagctttctacctagccggttggaaggattcaacaccccttagagtttcttgctagcctgaactagcccatagatacagctgacgttaccagaccaccaagccacggagcgcaggaagctcgcaggcttggttgtgatgtttgcgtagagaatactatacaccacacgcgaaatcgagtaccaaacaccgatggtgttgatcgtctcgttgggaacaccggcaaacagtgaaatcaaaactgcattatgtaatcagtatttctgccgaggtccaggcacgaaaggggcaaaagcttaagcaaagagggggatcttactggccgccacaaacagagggtagccctcctgagcattcgcatgggccgcctcgcgacgcttcagcttattgagcgtgtcgcggctgattttgcgagcctggaccgccgcctcgccgtaggtagtcaggtcctcgcggggacagacattgttgtcgatgccgaggcgaatcttcgcgccacggttgctcatgagacagaaggcccaaacccagtttgcgatgaggaagccggaggcgtggttggcggccgtttggccgggggcggcgcggaggccaatggtggtgaggagagcactgggttggttagcttcgttgtcggttcagcgcacgattagggtcactcacgacattgtgtgtggatttgtgttgttcgctcaagatgcggctgggggaggtcttataagcgtatgtgagagagcgagagcgagagaccgagggatgagatcatgtttgtcgatcggatccactttcagcagtcaggttgtgaagatgagatcacggctgtctgcacttttgattctgtgcttgtgcttgaaattgggttgttctgaacatggcatttgttctgacgtggcatggaactgacacatgtgaccacggatccatcgttcagcgcttgcaggatttacatcagcacatcgaaatttgttctagagatcacgctggccttggaaatctacccatgcctcgaaatgggcacaaactctttcgagagaagccccatcaaattgcgcaggatcatctataattggcgacaagtgtttggcccagatttgatcggcgttccatccccaagcctttctttcccccttggatctgcaagaaatcctttttttatataggcctcaatgtacctgatggcgtgagagaatgtggtattaggttcagccctgtgagtggttcgatagataacatatccacaatccgggagcggcgaagtctgctccgcagctcgccatggttgcgcgtgactggtctggccgaagtcgcgagaggagaagagatcgagtatatgaggagggaaagctccgagctccaacatgcctagagctagaggggctgatcccaagacggtccgagtcatgctcttaattcgagtgttgtgttgatataatcaattcactctgaaatcatgcagctgttgcattcaacaaatttttcaatccccagccagtccatgtaatcaacgcctgtcaacggtaaggttagattatggaaggtggagtatatcacctctgcttcattgttcatttagagatgatcagtcactgttgtttgacactccacggtacggacctacctccaagttggagcaattcttgcaattagtacaatttatcatgttggaactttgcttgcattgttcacaatccttgcagtcactgcaaaatgaacagtcggtcagagcacagacgaagccaagcagaaagggaaagcgggcggtacacagcgagaagttgaaggagcgatgacaaggacagagagccttgaactgaaagagtagaggctagagctaagagcgaatttgttgtacccatccgatataagattacgattgtgcgtggtataggactacatgattgtccctcataactagcccaaattgcgggcgaagacccactattttaagattttgacctgccacgccaccatcgactaaaggaacacacaggcctttttttccctcatttctagcgccaaaacattgggggcggcccccggtaagaagtacgaagtagagcccctcggctgcattgtggcctgccattggctaatatccgagtcttacctgcattgggaaatgatcaattggtattcaatcggcatgattgactcacaatatgtagaacccgtacaatttgatgcgaaatggggaacttcatctcagttgaatacttggcagctggtcttgaatgtatacctccccgaaactcatcttgacattggtatatcctatttttacgtccatggatactccgtagttaccgcccccacccgggcagtgcctacaatgcagtgatcggcgggggccattatttgcacataaaacagactagcttactagtctcgcatgccgcctttttaactcaccgtttgccaggaccgtaataactcatgttgtttccccatcgcaacacttctgccaggccgattccgccccgtatccctttacctttgattctaagctcgcgtcaatcgtgtcttaagcgcaatgtccgaggaatatgtaaagggatacgctattcgtcgaaatagcacatgcgagaccggcgaaaaccaatgtacgaaaaaagcgacatggggtgactaccaggcgtgttgtcctggaaattctttctgctttgattccgatactggaattcccaatatcatatgttgcgacaatcacaacaattgcacgcaagctatatcagtcgctccagcatgtgctgacaggagctggaatctattcgacgggaatggttctttctgctgtgatcaaggagagtcgggatttcgtgttgaaaatagagttttggttggttgctctgaggcaacatccccgggaaatgctagtttcatcaccttgccaacgatatcggtcggttagtttatcgcataccgacgacattcaatcaaaatgaccgattaacactttctcaggtaaatctgtcgcaagttcaacagcgacgtcttcatcatcgccctcttcatcatcgccctcatccccatcaacctcgaaagtagcatcaaacagctcgagtgcttcctcgtctaccaacgtaggcgcaatcgctggtggtgttgttggcggcgttgctggcgtagctgctatagctgccatcctctttttcttcgttcggcgccgcaagcaacaaaatacccagacactagcccagacaccgtattcgcctccagtgtattcagaagtcggggctggcctaccccgaaaggagcttgatggccaaacaagatcagagatggatgatacccctcttcgcgaaccacaagagttgccgacaagccattgattatgaaatgatttctgctttcaataacagccctgattatatgataaagcacgcttgactgaacaggggctcggggtttttcaatgcattccatggatgatgaccctttagcgtttctgtactcttatcttagctcccggattttactcgagcatgaggccggaatgagaattgtggcctttgcgatcgtgacgacgaaagaacgctactgaaaaatttgactattatggtagtaatataaaatatactaagcgatggggaaatggatcggtgataccttacaagtcaaatacacaaagatatgactgactgggaagtgatacgctttcgcaggggggtgggtgaatctttataaggtagactgttgtatgagtggcactttttacaccgcctagccaacgccaaatcaagtctgcaacttcattgaaccgcccctgttgtagtctggacctgctccagagactctgcaagagacgtcaagcctagagtatcaggcaaattttctctcatcatcccggtggatttctcacagcgacaacatctaatcacgatgacccacgaattcgagtaggtaccccgcctgcagatctagaatatagaatatacccatactaataatttcagatgtccatatgctgttggtaatgtgatcaagattcacttggagacaccagatggattggaggcaacagcagatgccaatatcattaaagtcttcaagccgttcactctttcctctgtgatgcttattcggatggcctgctcatctttaagattggaaggcgatatgattttgaagctctttgatcggcgatttgcaacgcagcttcgggaagacgaaaagattcggccctggaacccagatacagagactgagtaccgtcaatttatccttgatggcggtgcatcagagtttgttactcagctcaacgacggtgaaacacctgaaggcagtacatggagtgcggctatggacgaaacttatcttcatgatcacatgttggatctgtacaagacataggtccaggtatatagcaacctgaaggagattcaaggcaccgacataccaaaactccttgcatccgctattatgcctattccctacccaggtcaaacgagcagcgaatataccgatattcctgggatccttttgcaatatatcgaaggcttcccattgaccgatattgaggaatatacaccaagagaaagctggcaggccatctgtgaagacgccattcgagttatcaatcgtatcggtgatctgggaatacttaatgaggatgttaaaccaaggagcttcattgtgcgtgaggacgcggggaatagattcaaggtgaccatgatcgattttgcgctatgcaaattccgtcaagactataaagatgtctatgactgggataaatggaaatcgatacaggacgaagagggggcagtggggtatgtcatgcaaaggcgtttaaaaggtggattttcttaccgtcgatctgctcgatacgaaaagctagatgaggaattcagaaagggtgaatgagttgagactgtagggaaaatagaaatcaatatcaggccgaggaatatagcgtctgtatgtaacgttcaacctgacctggattcgaaacctcgactatgaggccttttagggaccatcacgacaatgggttttttgccaggcagaaaattaggtaataaaataataccgcctaactaactagccaggcgccaacacacggtatgtgttttcgacacgattaggtgcgaaggctaagtataagtaatattgatgcctgataatcccgaacacccttattctgccccctacaacgttggtggcgaaaggtaaaatctactgttcaatagttctgggatatcaatttgaataacaccccccaataagggttcttacctatgccgtgttgttgctttacccgtggcattctgttgctctgtcccagatgcaacctcgacgcctgtatttaaacaggagagcaagttgtggggataaggatcaaccatacacactactccagtacacaagtaccagtgctttctttatcaaagtatatagcattacgttcagcgcagagcaggcgatgtaaaaccatcatattttggtagccgcagatattatacatttctttattagcattaaaaaacaagaatgaaaaaagaaaagaaaaagaagaagaagccagcaaatccataccgccaaggctatcaccccaatttcccttccatctgccgactccagagtttgcggtcgaatcgttgttctagtagcgcctgcgcatcacccgcgtacatgaaaactctaccaccggtctccttgggctccttctcgtctttgaagtagacccagcagtctgcaacttcgtaggcattcgtctcatgatatgatagcttctgggcctcttcttcggatcgcacgaggtacgcagatcccgtcaccacatccccttgtttactattgatcagggcgggataatcaccccatttcgcaacagcgtaactaaatatctctgcctcgcgaagttgcggctcctccggcaggtcgaggatccttttcacctgggccggggcggttagagttccgtagaagaagtaatacactggaaaggcaggcgggaagtcgactggctcgtcgcgctgcgcaaggtagtccggtggtgctgaccggagcatagtatagaaaggtgatagtggctcctccttggcggggaaaaggcctggagaccagggtgctccggagtcctctggattcatgaaggctgtatgatgtgaaagttggacaaaatgttgaagttagaaggctcggatacggaacaaaggaataagtgggtgctcaaagagaaaccagaagaggcagtaataataatagggttaaaactaaactacattagtcatctgccacaggtccactttgctcttggctcatgtagccaataatatgtccttccttcatccaatatccgatatggtgtaaaaggccgtgacggagaaatggccacgatatgccgttgtataaattcgaaaactcgtggtgttttcacataggcattattttaggccattaattgacactatactaatttggacactagcgcgaaaatcgatcagagggagggtcgtgcagcgcttctatcatcaatacgaatagaatataaatggctatgtctcctacagccctgaccgaaatatttctatatcaaacgcctaccaaagcgctttgtaaaatcgtcatggactggaattcgttcatccgagagtcggatccgcaggttcaagcagatctttcgaaacccacacgagataaaatgcgagaggctcggaatgcctttcgaaggttatcaacccttcattcttcttatcggacggtggctgaccatctaatagatttacaagtcaccttaatccaccagatcacacctattggctgcaatccgagaacctcacattaagagtcattgaaggggttttccgctggtatcatgaaaactacagcttaggatatcaatccggctttctcaccatgactcgccccccccccccggcgagatagactagcattttggcaatcagggaccgagaaacaatttgttgagatacaaagtataaagaaatggagagcgttgattgattcgaagaagaggagagaagagagaaactgcaaaatacataaatatggatcgaaactatgtaaagggcacgggtgaggtagacgtgagacaccaccacaacagttttcggccccctggttgtgtcgctttccaaagtttgtcgcggcgcttattgcttgaaagcatgcggctaagggtttcctggctatgcgagacacctaaagctgccagatcctcgggtagagcgtgcaaaaggaactgaagatgaatttgaaaagaattactacttagaaaatccgctttaaccacctgggcaataaagaggtggcggtatttctatggcttgaattacgcataaggcaatagagctctagcagcgatctcgtagaacaaatgtgttacgcacacaacgtatgactataatcgggatagagggtataataaagctgggaaattattatagaagtatatacgtacacaccagggaagttagatcgatatcaccgcgttgaaagttcgtaaggtccttggcgggaggcctgtgaatgttctgacatattctgcgcgctttgttcagactgagaagtctgttgggcgctttgcccgtattctgaggtttgtgttgaggttggtggaaacgcaatggcccgaccgtagtccaactcatggaacctgctaggtttggtgtctggagcttccacgggcgccgtagttattatcgagggaggaggttgttgcgaagaccggtctgccgctgcactgtcctgactgggagtccgcttatatttttgacgatgggagataaaccaataagctgcagcaacggccgccaaagcagcaataccgcagccggcgccaatgccagccttggcgccggttgagagaccaatgctaccggtcgaggtcgtcgtagtcgtcgaggtcgtcgaagtcgtcgagttggtcgtgggagaattcggggatgcaagtaccgtccaagagttttcccaagtaggttcccagctattcccagaggatgtgatggtggtgtcactatcgctgatgtcgacaacattctgaatgtaagaatagtctggtccaggagcttgggctaaaaaccaggatttcttggaccagttgacgccgacgaaagcagcctgtagaaaggcacgaccaagagctggagtggagtcggtgcccatgcatgggaagtattgtgtaggactggtcaccaaaggggcttccagagtaaggttcagaagagcgaaagggaccttgatggtgatatcctcagtgttaacgccattcttggtgaaggtgaaacctaggtagctgggggatgtcacaattttggtatattgcgaatcagttgtgtcccaaaagtagagacccagatcggaattatatgtgataggcagattggcggcaatggcgtcgcacgaactttggggtagatagatatatgggtttgctgggtccactgctaccgtgaagccggaggtcaaagaggaattgctttgtgccagcaatcctgtcatattagagaatttccagggcgaaccaccttttgcaaccccgatacctatgtcgattaattcaatcggaaacttcccactgtcgactggctgcgcagagacatctccaaagactcgaccttggtcgtatcctctaagcttgagagaaccggatataccgaacgaggcagagccaatatgtataccatacgaataggacgggatttgtcctttgtcgtagagataactgttggcgaaagtggcattgatagggggcaatggggcgtctctggtgaatgtttggttgatgtccggacatcctagagaaaggacacccacttctaaggggtagttcttcccaccgggatacgtctgatatccctctaagactgtagtcaaatccgcggactgcataaccgtgcctccaagatccatggagtctagcgctcgagatgtcacggcgttgataggcactgcgttggtatatcccaattgcatgtctgaccattcacctgcatttgaatcatatatagatgtatcgttgtaagttgatgaatcgtggatgtcgaaaagaccagctgaatctgcgtaacagataggtgatatttttgtcgtgttgtcgcaaattgttaagaggagaaccgtgctcgcccaagatcctccgggatataacgcgatctttgtatcgttgccgctaatgcttacttcgacggcctgccagggaccatcaggtccaaatgacccagaagcctaggtcatgctccaaggagctacggcggcagcagagctatcgatatacaaactctaaagaagggttatggcccagagcaatggattctttatgccttattagagtgaagtgtcagccgaatctctatatcgctgcttaaatctgtcacgtggaatcaagccgaagtaaacaaagttggcttacctatagagttcaaagggaacgttggaatcagaggataggaaccacggttcgataacggttcgttcggcttttccagcggatacttcgagtaaacacgcgatattcactaaaaatagaatcagcacgacttgatgccagtgaaggaagaatactccgttgttaaacaggatattttctcagcaaccgccggggacggacgcatgtgaaaagccaggaagttgagggagattttggacggagcccactacggaccctttttggtattaactgttttaggtatgggttcagctggagattgattaaacacgtactaatgtacagtccactaagtacgagtatggagtacaataggggcagtaggcccgatccccttcccaccatacgaacaggtactagtagcacctgggcaaacatatacagaatccgatttgtcattgctaaacaaaatatggcattgggctgatacctgggtgcaatttcgtacactgtccgtcttgtaatacctgctaaatgaagatcgactcggtccattactcgataaagcatagcattgcacccatgactcgtagtcggcttgcctctacaaggggtaagaattgacaaattgcaggacgaaatacgagtataccagggtttgtgggctataataccaatagtgataagatccctatattttggaaggaaaaataatatatacccatagacctggtttctgttgtggacagaatttggtcaaaacgtgggaatcggaactggcagatctgtttgataataagcatggctttgttcaattgatgtatcttgaggccctaccctgcccgctgcccaggccttttccgctgcggattacgctgtcgtccagtaatggtgtttcgcccccaatttgtaagaaattagtgcggtttgggaccaaatgtctcgctttggttacggagcagattcggggtctcctgtgcttaccccggcggttagcttgctgtcattttcaacctggctaggctgacaggtctaagacgaaggatttcttcactcacaccacgccataagtaaagatacgatattgatggctaatcgctagactttgcaagcgatcataccatgactgtaaccaaacccctacgcgctgtatttgtcctgatatctatcatattactggtgatctttcttcggattcgcggcagttttggctatcttaggccataggttactatccaatttgggaaagaagttgactggactcgctttgcgtatatacaatatgtcactaatactgattatctgtgtaactcggtcatgctatttgaggccctgtatcgtctcgacagcaagcccgaccgcttaatgatgtaccccgattatttttcggtcgctgatgacgataatttgagggaagcggaattactccgtatcgctcgggataaatacaaagtcaagcttaagcctattcaagtttaaagcaggaacggcggtgaccgtaagtaatttttccctgcggtatacactatggtcgctttgccagtaccttccttgaagtgtccctcttagctaatatcaaccacagaaatatgggcagagagctatacgaagcttcttgctttcaatcaaatacaatacgacagggttttgagcctagactctgactctactatcctgcaagtctgtttatcacaatgttgtcttatcgttcctactaacctacctacaggctatagatgagctgtttctgctcctaccttgccctgtcgcaatgctacgagcctactggcttaatccagacgactgagtcctaagttcgcaattggttcttgtcgaaccgtctacgtttgaattcactcgcgttatgcaagcaattgctaatgcaagctctggcgactttgacatggaaatcgtcaacgatttatacaaagacagcgctttcgtcctgccacaccgttgctacgatcttttgacaggagagttccgcggcaaagaacatgctggctaccttggaaacccgttggaagaatgggatccctatgccattcttaacgagaccaagtttctccatttctctgactggcctgtgcccaaggtttgtgctaggattccaaagtcgacccaagatgctaacctgtgtgaatgatagccatggatcgaagctcctaaagatattattgatgaaaagcagcctacctgtgatttcaaccctctgacctaacaggaagatgactgtcgcgctttgaacatttggttgggcatttacgacgactttaagatacgacgaaaggttcgtcatattagttcctctgtcacaactatcagaccgtgttgttttctaacgaaagaaatagaatgtatgtaaaaccagtgcagcggaagcgtaattaatccacgagatgtcttcactatctcagcatactgctactgcatacgttagatgggccagtgtattctcgcatcgttggatgctagacgtctatcgattttccctcttatttctccatcgcgatgtacatatgctgtttttatttgcgagccagtcatttgaagcatgcatttcaagccaaggtacgtattgtaaaagctgtaacgatactgttctggacatcatactgcatagtatcattgggtcatgcgccgtcccctttaatttaaaggagtatgtcgaatttcgtacagcgtaatttgccactagaccataacaaaaaccaaggtgcttgtttagggcctagaggggccatatcccattcttgacagagtacaatatgtacgtctgcctccgtagcagcctcccatgggttttcgacgatatgagcgtcaaccccccgaatatccattgaccaaatttagaagggttcaacatatgtgaaacatcctgccgccgattatgcacagtagccgggattgtcctgattcatcttttcattttaattaactgataattaaaaatttaataaagtgacattacgcatgaaccaaattatgcgaagcccttgatgaggtggaaactgccgatcttgtaccccaatgggatggatgtaaagatccgctggggttcggcccgcccgcaaatgcattggtaaagtttgtggttcgttacacttactgtacaggtatggtaagacaatttacagcatcacggaaatgcacaggtaggcagtgttcgtaacatattgcgtgtaagcaaattgagaccaattcaatgcgtcaacggcagctggaccatcgtagtgactgggaatttgtaccactgtaggctcgccatctataatgagcaaagacacaattataacaaaaaggaaaactatggtaattgtagctcgcatggtgggtcctgtggggaaaggacaatgaaaggcttggcaagggttcagttggcagagaaatactttaacccatatagaacttcctttttgatataaaaaacagtgagtattaaacagagcaataaaggttgagatatacaggaggcaacgtggttgcgttctggtattaaaaattgtcactgagcccgctgtactaaagggctgggtaagcgctaacgtgtatatgcgatataaagaaaaaggctaggaagtcggaaaaaatacaaagtattcgtatagaaatctgggggccaaaggtgcgagactagtccatataagacacgtaagggtacttttgctatgttatgattacacctataaaacgacaaaattagggataatacctacgcgctaatgctatagggattcgaatcccagggtccgagattggatcactacgcgctgggactaatgtgctggacagcctcccctgcttggtattgcaagatgatccagataaaccaacaccggtttaagaagaggtgcgagcctagtgagcgcgactcctagtgcccctccgacttttatcgtctcgttccatgaacccctggccccgaacgctcgtgtctgtcctctatattctgtctgtgatatagacatcagatgcaatatgagaatgtcgacggggatatcctgctcacagatacgtcgaagtcgaatcggcatcatttttctgcttttcgccctcctggatttcagctctgcagactcgcttccatgggtgatgagatggtccccaaaaggatttggaccagatggcccttggaacgctgtgttgtgggaaagaggagatcgctctgtatccaggggggtggtggaacagctacatcattctttcttcctactgttcaaatcgcacgttaacctcctactgctatgccgatgatgccggcaccttcgatactcaatcgagcacttgggacaacacatccattgattatacgccttatggcttgtgggggtctctggatttctcgcaaaccaacgacaatccggtcttcggaagggctcactgtgccacagatacgatgagtctatatggggtagacatcccaaggtccaatctaatcgctgtccaacaaggctaccagacctaccccggaggacagagttatcctctcgaagttggctccctagcgctgggtgcccaatacatgaaccagacatttggcaacatcggaggaaccattgcccctggctggttgtggaacgggtcgaagcaaatcgaatcatattcatacggcatgcacattgggttatcctcgctaggtattccgggcagtttgatgctcggtggctacgatcaaagtcggctgctgggtgacgcttctgttcagcctcacacgggcagttcggcgcctatcaatctactcgacgttagcctcggtgtcgtgaccggtggttcgccatgggattcttctagcaaagaaggcctacttgcacaaggaaactcttctcttttggggggcaccaccgtcatagcagccccagtcgatccttgcatttacctgcctcagggttcctgtgacgccattgctgctgaattatcagtgactcacaacgctgatttgggtctttatatctggaataccaacgaccctcaataccagaagatcgtcacttctcccagctatattgcatttactttcaccaaggataacaccaacacacaagacctttgagatcacttgagttgcaacatgctctcgctgttgcatttgaagaggatagctttgacgaaaaaaatctcttagagaataagacatcatctctgtgtgtgcaggcatggttacagctgatgagtaaagcgacgtcgttcaactacgacactacacaaggtatgagttaagaataactgaaccgagttctttcccgatgctcatggccaacttgcgactatatgtatttcctacatgcgccatgaggtacttcaagatgggctcacatcctcgcacagtcagtttaaagactatcttgaacgatttccaccttttgagtactcggccaagaattggggctatcatgcacgcatgtcccactcaaaagtgaaggaacaagtccaagcttttgttcagagcgagaacgccctttctcaatccctctgggtattgtttgccgatcggtaccttcggcgaatcaagcaggggtgctcaatcagagcctctctactatatactgcagcatacttcagccttggagaatgtcttctttactttctcgccaatagtgtctcccgtgatacaaaggacgatgatggccagactgcattacactgggctgccagaaatggacaagtggaagcagctgaactgctattgaagcatggtcttgaagtctacggggccggcaaagaaagaaaaacagccttgcattacgctgctgaccaggatgactcacaattgataaaactccttgtgcaatatagggcaaatattgaatatacagacatcgatggccagacacctcttcttaccgcggtgcagaatgtgaagcttgagctggctcaagaactagttcgtctcggggcctcaataaaagcgatagactctatgcgtcgcagtgcgctacacttatcaaccaaggggggaagtcgcagcattcagatcaccaattttcttttagcgagaggtgcttgttctgagatatgtgacgtgggaaacatgatgccattacattacgccatccgcaagggatctaaagacacagccgaagcctcaattcaagcaggagcatgtgtcaacgctggcatcgcgaggaagagatggaatcgaacaacaaaagctggccgcggggtttatgaaccttcacctggagaccaggatgcccctggaagtaagctcgttcatggcctaactccactgcattgggcagcactcataggccactcggaaatggtcagatatcttctctccaaaggggccgaccgaacaagcgttgccagggtggcgacacaccgttgcaccttgccatacgcgaagatatcattcgggattacggagatacttggaactcacccgaatggcggattgaagttctcagcgacttggttggggctggaagtgaagaggcttaactatatagaaccacgcacgggtacgcacaaagccaagtgcgctaaaccaaaagggtcactaaactacattagtcatccccctcaggtccactttgcccttggttcatatagccaataacatgctcttccttcatccaatatccgatatggtgtagtggctaacatcgccgtctctcacacggcagccgggggttcgattccccctatcggagtttaacttgacatatctttttagatgcggttcgttttgtactggttttttatatattgtacacgcgagaagaaagagaaggcggtgattgtttcatagtcatacaaaagttcttgtcctgcatagttattacatgttgctgatatacaaaagtacgaatccttactactgacagtactccgtacgcataaagacaaactaaaaaaatcctctgacccgggatcgaaccagggacctcaagataacaagttctcttaaagaatagggcaattacagtcttgcgctcttccagctgagctatcagaggggttgatacggtacaattaggtgcctctaaaatccataagtttgaagttgatccccaggttatcggcagtagatcggcaatagatcgggttttgttatcgatcgggattttcttatcggtctccttatcagtaagtatggcggaagcgtccacgttgacatgtgaaactggagatttcagttgaactattttaggtcgttttctatcatttgccatctaatctagattttcccccaaaaggccctcaagttcccatccggtgtcaacttcaactcagtgcacggtgataatggactacgctattttccccatcccggcatccattcggcgtcgactaccccgcctatactctgcccgagccgtccccgagaccaccgaatcgagcggggatcagcaccgtggacttgcatcttcgtcggaacctcatctgctatgtcaaagccaattgtctgcgtcagtagtacctgagctccaagggccttccatggccagcaatgacttggatttgttcgaccctggccccgtggggtcagatagtccccgagaggacatggggtccccgacaaaatacgaaaccacatcggggctgcggtggaatcgagtcgtacccggtgagtcctctccggttgatgttcgaagtattcattgcatggtttttactgacggttttcgtgaagcgttcaatcttctccgaaatgcggggtatgaagcccagcagccgcaggctgatggccgtctggctcgatctctctactttaacgctctcatttaccttctcgatgctttaccttccgacctgaccaatgaggagacctccatgcttcagcaccatatccccgagccggtgaaagtcgagttaacaacatactcccagccgtccgggtatatggaaggtgcgaatcatacaatatgccctccgccaagatcatatctgcataaatttcttgcctcaatgatcttgcagttgttcattctattgcggttccttctaccatatgcaaaggtgctattgcgccaaatatatgagtatgaccggacacatcgcatcactcggcgtatcatgaccatcacactggaggcagctgacgggttggggaaaggcggtgttaatatcggagctgctgttagcaagttcaacgaagggcggattggcgctgctctcactaatttcgcggtttggtggatggaaggtgtagctggaggcatatatgagggggttggtgaggggatgatacatttgggtctcttggggaaagaagcggatttggatagacttcctttagagccgatgagtatgtagatagatagatcataggtcatagatggcttatattagattacgtcccaacgagagcaatgaacatattcatggagtatgacatcacatcttgtagcaagctccttagcaatgcccatcaactttatagtgatttgcagcgatgtcgagaacactctaggccgtaatagcatcgaaaccgatgtgtggaatgttggcactgatgatggcaaactatgaggttgatcgagtcacctagcaattcttccagtgattggttatcgccagacttgagtgcttgttccaggtctccgtagagagtggctgtcaaattacgaagacccatagcgctcagggctcgaaactcccttttggggggatttgatgcctgtatgccttattttagcaccgctctcgataactaccgccctatatgaagccttcggcctatacaaatttcggcatcttcatatttttgggtggtttttgagttccaaaaaaatttctactttgagttgactgccggttttctcttcttctttcttctttcttctttctttctccctcggcataaatccgggtaagggaggtggaagggatcaaatcctccgtctccgctggctccgccgaggtgctggagatctagcacgcttgcgacggactggctttggttttgcggctgcgataataacagggtcagccacgaaacaggaatgtaagggtgtgtggattacctcgagggatgcttcgagcggcggccagatcaagcataggtagacggcttcaatgccgagacataaaggaattctaggatttgtgtcacatttgacgcccattttctactattatggtaattcaggtatttaaattttctgccgttctaaaataaggcatccaggaatcaaagcctccccaagaggagtttggaaccctgagcgccatgggtcttcgtagtcaaactatcaactcatatgtacggagtaaaattagggagttactatttatatagggaattgttgctcacacccccggaaaatcggctctagtggtccgaggtctagttggacttctgtgactgatcttgatcttctttcaccgctcatttcccctccattcagccaatcatccatatttcaatattacttccatcaatacctgctctgttcacgatgtgggaaccagtcgctatcccctttcagaactccaagcctctgcctactctacctacaacagatgaaattcgcgcttgcaccaatgttctgtgggagaccatggcctccaagattgtggcggtgaacgacgatattgttgcaaaatatgggggtactgtcaacgcctgggaaggccaagctttggtttaccttgaacgatacgtcccaggagttccggcccctcgactatacgcgatgtactatgagtccaaacaagtcttcatgatcatgcaacgcgttcctggggttccgctgaattccatctggccatcattggtggactctgagaaggacgacattatcgcaaaacttaaactaatatccgacacaatgcgaaaggccgagtgtccatggcccgactttttcggaggcctggacgggggcggcgtacatcactacctattctatagccagcatggcgataaaaaattcctagggcctttctctggcgagcctgccttcgttgcggcccttgtcggtaattatagagccttggtcgaacgcaataagcgtccagacttcaaggctcgcttttacgaaaaacactgggctcgcgtccttcaaggtcaccggcccacattgacacatggggaccttcagcagaagaacattattgtcgcagagaatacaagtcgcccaaacgatcaaggtgggcgatcatttgatgtcgtactggtcgattgggagaattctggctggtttcctgacttctgggaattcttttgtgcatcttccccctttatttttgactggggagaagactggtcctggcgagtccaggagtttcttcaagtatggccagccgaggtggccatgatgcaactgattgacagggatctaggctggtgaagtacgttgctatgtttagaacgaaatcgatgtattcttaaccacaaagaaaaaataaagctcgtcaacttccatctcaatccttcatcagaaggctctggccgtcatctgcgctccgcaaacaggcatccagagtgggtggccccgattcttctgggatgcgatcgtatgaccgcaaaccgaaacaaaccgatacttcaaatttagctatgtaaaatgccttcctgtcgcaacttcggaatcgcaatctgatgtgtccattcattgcactttatgattggccgtcgttgttcgcctggcccgtaaagctccccattctccttcgtccaagtgatcttattccgcttgcttggatcatggctccaaaagtcaatcccctgctgcttggtcggtgtgggcaaggcttctaagataccccttattctcggaaaatcgactttgtaaatccatccaatctctgtggttctgtgaaaatgcgcggacgctccaggagtatagctttctttcacatcgaagtacatgccctttgcggcgatgatgtcgccggtgacatgaaatagatctccttcgaaaatatccgggtctgtttgaatgaagacacctgtgtggtatcgcttcgcagggtccagaggatcgggggctgctgtgtcgaactctggtgtgaagactctgtaccgctcggatgcgggaggattgtcggacatgtttgatatccagataaagacgtgagaaggacgtagcgttgatgggggaaaacagagtatatcaaagtattgagacactggatagtgaaaagatggtggtttcagtcaggagaaaagaaaacaaaagtgaaaacaagttcagtaattacctcctcaaggcaagtactgtaatgggaaggaatgtaggtgatctttctttttagaatgggattcattcttccttttataatgtcttccttctataatgaaagtatacatgacatattttaagtatcatctcgcctcgtctgaaacaaaccaattggacagcaatccccgccaggtctcaaattaggccgagtacctcttccaaagttggcgcccggagtactcctttgtagcctcactttcagctctctgacgctagcgctggacttgcatatgtactatgtccagccatttcccttttatggagccaatcgtcgctcgatttctcctctagttatattctcaaaataatcacactggctttgttcaaatgtgtatttattatcgtgtcgtaatagtttgtaatgctgaattaagcaattggacgacagctgcggagaaaatctacacatgtctactccgtatagcctgcggggtatcggctacgcgccggatgctgtggaacgtgccgtctttccacaattcgcggttttgtttcgccttgaaacattggctggattgaagtggtcaatgacctctaagggcttgccgccagcctgaaaagcgcaaccttggaaagagaatttgttttgtcagtcgatcaaaagtggtcctagatgggcgtcaacgaaaatgttcgacgttgacaccgaaaatagtgtcgcaaccaaaacgtaccctttccaggctgagccgctcattgcgattctgtccaaaataccttgccccggctcatctcccggtatgattagacttccggtgtcaattttattatcacccaggagcagtgggtgagcgttgaggcggcttactggtcaaagatcattggctagcacgtttcccccagggtgagcaactgctggctgcgcccgctgtgctacgaactctgtatggatccctatagaagtgcgctttggtgtttcatggatgcattagcgaaacgcccacgatgttcgagctcgacaccttggcacccgtgaattgccaatcatttttggtagccttatctgatccaagaggaatatacatgccagccgaggaatacatgtcagctaaggaatactcgtgtcagtcgatcagccctgtttgtcgatccgtgaggggtccatcatatgatatgcatgttgacatcggggcctttgggcagatagattccatatagtcgaggacccccattcccaacgaggaagagacactcgcacaacgacaaagtcgctttcaccctcggaggactgacaagcattagtcccagacaatacattcatacatcgtatcttacccggttgacagaccacacactggaatacagtgtacctttacattatctctgcaacttaaataatggtcaataagcatcagttccactaaatattttattggatggacctggcggatggttgcaaacacaaaaaagttcgcttggtctaattgtgtggactcctctggactgcgccaacttgagcggtgaatagatactcaaccctagttcagcctgttgagtcttttcagttgccaaggttgatttgtatctcgggaggatacgtgatctgggctcaaccccataactgatcggtgatggtagaggatttgaataatatcgattgtaccgccaggcccaggcgacggcatggatctaggagtcacggttcgactcgtccgttagacaactgattcaaaaaaagggagacaggagtgtgaaaatgcaattaattgtggtgcacggaaatatagtatcttaaacgggtcaatattattctcgatcttggaacataagcctgacttggagggtgcgtactatcactacaacatcctgttgttgtatgtatgtcttctgctctgcagcgagagaaggaagatagcagggctttacgagtcgatatattctagaatattagacttccaatttacacccgttgttgtatgaggggggcaaatatactgatttgaaggaggcggtggaaaaagcggtaggtagaatcagccaaatcattttatagtcacgattggccgttattctcccccgtatagccaggtgagcgtcaaccccggatcttcccaactccctctgctaaagtagacatgtcgacctccaagttgccctgcataccttcacttcgaaagcagcagctccacctggaattgtgagcctatgtaccccgcgaataccattttatgtattgacacccctacagcgcgagcctgagacgtgcagcaccgccaggggtttacatgagccttgcgcctggggacccgacactttggaatggagtgatatttgttcgctcaggtgaattcaaatttactattccctccgccatgcgtcgattaactcctgtttgtaggtccctatgcttcggccgtcctccgattccagctccgcttcccagacacctatcccgaccttcctcctctagtcaccttcgcgacggacttgttccacccattgattgtgcctcttactacatatacctatagcactggctcggcaagtgacaatcccgtcagtgcgacggacgatgaacgattaccgcccggcggattcagtctgcgccatggattcccccactggtttggtagggcaaaacggaacacatcacggaatgtaagcggtgctagtgcaagtgctgcatcgatcggacgcgcaagctctaccgatccggttacagacgatggtgatgaatcgaacgcgtcaaaccctccagcggcatcagcggctagtgaggacggcgatgtagaagcatcgcgggtggcagaagtacctgctatagatcagttttcggaacgaagagacgttgtccctgtgtccgagatactggattacattcggtcgacctttgatgacgaattggttttggattcgctgccggttgaggttgccgggaaccccggggcatggcatgcatggcaggcacatcgtcgaggaggccctcgaggacaactgaaacgtggaagcccgcaggctcggcttccgggggattggcactgggatggaatttgggccaggcgggtgaaagatgagattgaaaactctcattctgagccgatgctgtttggaggtgctgctcgtgggggtgtggatgaaatggtacatgacccttggcgtcctttcttgacttgtactaaccacattttagattcgattctcgcggctggatgatacaaccatgaactcagtcaaggagaaaatggctgcaatggcaggggacgggatataagtgctattatgatacccaaaatgctactttacgttgtcttaaatcttcatcgacttaatctcggaatatcccacggatcctccgtccaggagccatggaaatgccatcgtcgttgccatctgaatcgtcggtcctcaggaagcggcaggagcatatggcttcaacgttgtttacttccccatttctcctcctcgcatcattatatcccagcaaaatgacctataagctatcatatgatatcaaaagctcagctttaattattgcattgatccttgttcctatcgctgttctcgtctttgttgttgtcgtcgctcttgcgtgttccaattactggagcattcattccctcaaagaatcgttcctgtcgtgcttcagtatttggaagcagcagagacgcaagaagatcccatcggactcagagacttgccccatcacgccccggtcgactctagttcgtgcgacagacgcttcggatattcggattgaattcgagcgtcctgtcaccaacagagagcatatttaaatctcgcgacaccatggaggaaataccaactacgccgatttctgttcttaaacgccgcaccccattcattgcacacatacatagagccagctcgacatctagctctgcttcgagcttgtcatatccacagatcccttctcgccattcgtccctttctgcgagcgtggaatacgattcaagcgagcttgcaacatcaaccagaagcccgtctctcagtgatagtctttacaatattgatgtggttaaaattcgtcaggaacatgctgcagcttcccgaggtatccgcaaggctggctttgatgcgaatgaagacccatttatcgatcaggtaatttccgccatggtttcaagtgcattgtccttactgacctttcccttcagacatcgcgccgccgggttgatcctcgaagaggactcatgactcagagtggatatcaactggcgccacaacttcttgtccgctggagctccgggtcttatggttctatggagccatgtctctcgtcgaagtcagcctccgtttccggcgcaatggaaccgccaacagattccatctcgaaacataaatccagaatggacagttcccggtctttatcaaacatgctgcgcccagggtcatccgggttactttgtccgttggagcttcctgtcgcgttcgccaccatgaggtcctacacaggctggccgtgcatgggcacagattcgatgtctgtgtgggcgtcagtaaatgtatctgctgatgttgagcctatttcgctgcctgagacctcgaccctagcaccccttgacattatcatactttttgatagcttgtgagttgatccgttggtttaatcgtcaagagaaaacatgttttgctgactatcaaataggcgacaatcttctgttagccttttgacgccaatggtcttggcatcttctgtgcttgcttcaaatctggtcagcaatgacagaatagccgtagcatgtgttgacggaagttctaaagacggttttaagctattccttccgctggggttccacccattcgagacattgagagctgccctgaatgaattttctctccgccagttgaagaagaaaacgagaaaagcccctgacgcgagtaactctattcgacaggcatctcgactcttttacccgtctcccagagcagcgttttgtcatctggtattcatatccgcgtttcccccagaaaatctgtttatatctggcgtggacacggctattggtatccatacgatctcccctcagccttgcttccctcttggcacagcaaaccatccacttggatggcacattttctatgatgccaatgcagatgatccacgatcctgcgaagttcatttcatgcgaatggtctccaaagtcattcggcagcttcgtaccggtctcagccccgggatcccatccaacttgaaattgtttgttgagcagggccacggatgccagtttgattcggcaatggaagactgccacctggcgcggttacgaccaggggagacgtggatactcaaagtgaaaattggtgttccgattgagttttatcaggaaacacaattgactgaacatcccgtgttcgaagacttgatcaggcagatcaacagtgttctaaaagcgtattcttctgagccggccgcccagcatgttctaagcgcccacctggagcaccagcactctttgctaccgaaaccccatgctatttgcttggaaactcattgcactatctcgcgcatcccaggtgtgccgccccgtccttctgacgattatcgcaaggtttcagcgctaatgtcgtatgaaatggacgatgatgctatcagtatcagcttgggatcttcaagcgaactcagttgagatcaactgtttgtatttgctcgatggagtcatcacactattcttatggcctaatgcttgatttgctcccgacttgaattatgctttatatttgtatctgtataagaaggctttctcttactcttggagtataagtttcaattggatgcaactcgctatttgactaatgaagaagaactattccttgtgttcaaattcagtactggaactgggtatagtgtagatatgaccacacaaacgtcgcaagtcttcccaatgacggcaaagttcgacagcaggggatatcaaatgcgagggtagacattgcccgccatccgccatgtctctttgattaaatccgcacatttctctccgatgccgtaagccggcatctgggtatgtcctccatgcaatgtaggcatgacactgcaatcagcaactcgcagccccgacacacccctcacctgcaacttctcattgagaacagccatcggatcaccattcttccccatggcacaagtacccgccgcatggtagcctgtcaacaaaagtcagtaaccacaagacgaaccgtccttccaatacagcactcacaagtagtcgcatgctgcttcacatacggaacccactcctccctcgacttataagtatggtgcttcaaattcggcggccaagaccccttaacgatatccttggttccagcaccctgcataacaacctcattcgcaaaccgacaagcctcactaagaaccaacacatcaagcggatcagcgagatagttacaatcgacaatcgggttaaccgacgcatccgccgattcgagcaccaccgagccacgagacttcggcgcgaacagctcggcaatgatggaaaacgcgtgctggttattgatcgggaattggtcgtattgcttgggaccgccgtagcactctgtgctgaagaactcgatgtttggctgctgtggtgtgagacccatagggtcacggccgggttcgcgggaggtgtttttccagagaggctcgtcttgcagtcggtcgtcgaggcgcgcgaaggcgaagctgccgaaggggaaggtggataggaagccggttttgttctctttccactgtgcgtaggttcggtcgaagttgttgccgtggtagacgtggtggtcgtttgttaggccttgcttttcagtttcgtagaacatgaatacgatctagaggtgtggactgttaggatggttcatgttgatatgatcgttagggaatactgacgagatggtccatcaggttcttgcccacgcctggtaggttgaccaaagaaggaatgttgtgctgttctagctctgccttggggccgatgccagatcgaaggaggattgcgggactgcagtaggcgcctgcagagattatgatctcctttcgagcgtagtagatgcgagagccgccatctgaagtttgcgtgactacgcccgaagcgcgagtctcgtttctctgcttactgaagatgattttgtcgacagtggtgtcggtcttgatggtgatattcccacggtggctcttgttggtaacgaaatcagcacccgttgtccgcgtaccctggtatactgtgcgaggtacatggccacatccttgtgcaacatcgccggtgctgaacatgtcatgatgaagaggcatgccttgcgagacataagactccatcaaaagcttggagattggcgccagatcatgcggctctgtgtgaaggggaccggagtgtccgtgactctctttgtcggcctggaaccatggctttgggtgaaatgtctctgactattcgtatttttgttgtcagtgcctgcttattcaatgcggcgtgggaatcatatcacctacttttttcatatactcgaaaaactcttccccactccacccatctagtccccagtcatcataatccagcttgttgccacgaatgcaaagcgtgccattgcacccgctggatcctcctaggaaccggccacgactcagcttcacttggcgattgtcaacccctgccataggaggagtgacgatattccagtctgtctcggcatcgaagttgtttgaccacctaatctgtcagtgatgaggaatgcatcaaggagggctttgcgactcacccgccggtcatgtgaacattctccaggtccttgttatgctgcccagcctccagaagcaacacactgacctcggggttttcagctagacggccagcaaccacacagccagaggttcctcctctaacttatggtaagcaagattgtaagcttctgtgggtggataactatcttacccgcagacaacatagtcataggtatcctcaattccagaagccatggtgtagatttcagatcacgacttcatcaagatggcaaattaaagatcaccaaaatgcatgaaatatgagctcggctttttacaccggacttctgaaataggggaggacggaggcgattccgcatactcgtgggtaacttgggacaatcttacctgtttatgtactaggcagcgacattgggcttggcagaagtacatttaatgcatgatctagtgatagacttgcatcagccggcatatgattggtccaaatcaaaaacctcgggataccccaaagtgtggagtttgcggaatgtccagtccactttccgctcgcggggtatggggtatgggtgaaaagcgggatggttccacatcaaaggttatagaacagtcgattcgcacaccaaaaaagagcccacagggccgttattgtttctatacagcagtctcataacctattgagatgctgagaaattcgataaagcaggggcgtggtccaggatggctttctttccccaaaccggatccccatcatcgtcaaactcagcccactgaaagaacgaacacccttcctttcctggtgcaaaaccagcatagcacatccacatatatctgcctcgtgtctcatgcttgcgttgtgcacaccggagaatcgtatgttcaccacacttacaacgtggagtgtagcgtgggtgtagagtatcacgataccaacgataggtgatattgatacgtctgttaccggatatcggatgtggggagatagcttgagccggggtaatggagtgtttccactcctcttgcatctctgcgtgcataataaggagagaattgtgcggaagatagatcgagatttggccttgggcgtcagcccgtgcagctgatgcagtctggtttcgcgcaaattttgggactggactagtcttatccgcatcttgatcttcttccgcagtctcgtcgtctcgggctactattcggcggactcggaattcgcgtgccacgcccaagctcaagcttcctatcactgggtggggcccaagataggtcagttcgtcagagtgatatcccacgctttcggtcggcccgtcgtagcaattaacgaatgctgcgttgggccgccactcctttggtgactggtactgtaacttctttccgcctggatagatgtctcgaattcgtttgttgatctcgctgttgacattgttctgtacttggcgtgacactaaccgtagctgaggtgttacctggcgcacatttgaccgatatgtgccaccgtatgtgtattctgacgtctgttgccggtgttcttcgggcgtagagacgtacacggcgtgtgtgtggggactctggacggtgcggttgaagagttgaaagtcgtaccgagaaaagtgtttagattcatcaagtaattcaagtagaagtgtatttgcttctttagctggtaggaagttgtggatgatagtacaaggtgtgtaggtggcaatatcctcaggcgagtagaggtgtaacgttttgcccttttgtgggaggggaatgattttcttactcgcacattcattcaaaggtttcatgcttccgtcttcagcttttgtaagaatatgcgatgagagagatgtctgcattccgaatgatgaggtaacagcagctcgctttttgctgacaagtgtgcctgccgtggagcctttctcggagagaagtccagcagcattctccacagacccttcgcaggataccagtatttccaatagctcatcttgtttgatagtcgggaagagagagagcagtattgctagcttggtatcagtggtgtcttcgtggggatctgatgactcgggcttggcctcctcgctcggatttaagagccgcggtcgcttcctggatatgaaagcatccatggatgttcccagtctcatccttttgaggctctgaaaagtaacgaatgggcctcggggtgcttatgacaaatcacgataaaatgcttatcggcacatgatttccaccgaagtgaccaatcagatcacgcacagtatgaggctctccgtagataggtgcaaattgtagatgatctctatagaacgacttttaaactaggtagaatttctgaaattggcgatattggtctgctatgcatggctcagcatgtctactttcatttcgtccaatttgggtgacccatcatgaggttccttcctactatatcgcaagaacagccgcacttgcctttgtgtggtcttaccttggtagatgggatggtacggccaccagcatcggtctcgaactacacattatatacgatatatgcgaaaaaaaatggttgaaactgattgaaagatacactctaatacagactaaatccatttgccctctcccaaatatacctgtccctcccgatgatactcaaccaggggtttcatctgacgaagcccatcaaagatttctaccaatgcatcgagtgccactatcgtccacccatgataatccccctggttttctgtaacgtaactagatacacgttctatatcgtggctcgtgagcgggtgatcatcaatcctcgaatccggaaaattctcctcaacaaccttcacccagcatccacccacatctgcatccctctcggccttcgacgaacgatctaaagcgcatttcaagtgcgagaagactgcatcatcgagcatcaagcatatgcgcagtctgcttgggagctctatttcaggcatcgcgagtgacaccttgaaatcatgaaacacttgtcgaatctcttcctcattcaaatcggcgaacatatctcgcgagttgaaaatcttggaagaatatgtctctgtgagaatttggatttcttcatcggatcctgtcaacgtccggcgcaatgcccggctcacggaatggttgaggtagcgcatgaatacagggaggaggcgcttggattcgggggagtaagaggtgcggtagacgatgggtccccatgagagagtgataaagtcacgctctgggcctgggggcagggatctcaggcctggcaatgcaccgagtcggtagacttcttctttgaggaatagactggccggggatgtatactgcttcggtactggcgtttgcttgtcgcctcccaatttgggtgccatttggctatcgtggattcttgggcttatcatggcagttggattgtatattaagaagagtttatgttcaatcagaatcaagccgagcagactaaaaagcagatcttgaaagaggccaattgtggcgtcatttccatactttgcagattgaggcaaaatattatcgggtggctcaatttgtacctattgaacatgattggcttaaatccgtaccagcgaatagataattgatctagaatggttccttttactgttgcaattggggcttgatgtagctgtagatgtagcccgttgacgtcaacgaccacgaacatcacatactccaccctcaaccatcgacccagcagataagacgagagcgacacaagtgacaacatcaaccatccaggacaatcagctagcaagtatggagatgacacaggtcgcagtagatattattatctcctaatgcaacaacatcctgtaaactttttcattctgtgagtggtgactggtctagcttctcctctgggattctagttcacatgaaggcccctagttaactaaactttctctctgtctggaagataaggctactactaggataccggctttcccaactgcaatactcatataggcagagcagatatctctgtctaagcatccacctttctctatcattatagcttccaaaacatgcactagatgcggtcactcgcgtcctttagagctatttcgctcgcgcgctagcaatcaagaggccgatcagtatcaatcttatcgagatgccaaaaagaaagagcgttctagacctactattgcatcgtcccccccttacactatcacctctggctataaatgccccagtaccagaggcatctctgtcgccagaaccctcattgaaacaatttataggatgtaagcgcaacttacctctagaccagttccagtctacgtttctctcgacagagaccaaacaatgccagagatgccgtgattactacgtggaggcagcaaagcacttactttggatgaaacgactgctcaattcaattgaatttgacgcacaacacgatctaatattgtcatgtgacaataagcagaccattgatctgatgaccaagccaagttcatcatatcagacgaaattacgccacgtggacatcaataaacactagctgcgtgagaaggtaagaaagattcaggacttcaaggtgcttttgggacggaaggtgttttgttaatccgtcggcgatcatatgctgcctcagaaagtgcaactaactctgcttcgaagattaaaaagaatcccgacattcgctgatgtctgacattcgctgagctctcggaactcggattaatacatgttcctctgtgccaagaggcgctaaaaattggcggtcccatctgggcgagattcctagtatgcttcatgtttgcttgctcgtttgcttactcgcttactgttcgcattgtttactttacatggattgtttgctagatagctaagcgagaaagttcaagtttgtaacgtttgcaaagtggtcagctatatcaacttgcttcttctttctttctccatcttggttattgggttgaatatactctttcttcttggtcgatctggcaccttgtatcctgaaggagttcatagaaagaaattacatatgacgccattattgtccgcatcgacagcgtcaaagcccgttctaagtatacgtaataaagtaaattcaggatcatcacgttcaatacctggaatgggcaacagatactaaaatttcctatatcatctaaagcagattctccattgagaaaggcttcaaacaagaatacaaagacgaagacgaaagaatcatcaacaaccaattcattgagattatttttagtatgaaattgctgacatagataataaatcaaaagcgaatgtgcaagtggcgtgcctgaagagccaagaaaggacctcggcccatttgatccccgcaatcccgagatcatacgccaatctcaactcgacatcttcacgagctttgacgtttgtctttttgataccctatagcttgcttgacgatctccttttttctctttctatttctctttcctacctccctccttgggcgaccggcgccaatcagttgctcgtcatgctccattaccgcacacaaggatataacggttgcgccgtcaaatactccccattctttgacaatcgactagccgttgcaagctcctcaaattttggcctagttggcaatggccgccttcatattctagagttgactgcgaatggaatccaaccgctaaaatggtaagtgggatattccagaccccgcggcggagtgtgctacacagaaacctaaccatctggcgctatacaacctctaggtttacgacacaagactccctatatgatctcgcatggtccgaacttcacgagaaccaagtcctcgccgcatccggcgacggcagcatcaaactattcgactgcacagcgaacgacttcccaatctcaaattggaaagagcacgcgcgggaagtattcagcgtcagctggaaccccgtcgcaaaagaccgcttctgctcaagtagctgggacggcacggtccgcatctggtcgccgcatcgcccacagtccctcctcaccctcccaacccacagctgcacctactccgcatcattctgtccgcacagtccagacatcctctcgtgcgtgacatcagactcatacgtgcgcgtgttcgatctccgcacaccggcctccgcttccaaccacctcgtcacccagatccccatccacggcggaccccccgctcctgcaatccccggccagccaggcggccctaccccgcccgccgaggccctcactcacgactggaacaaataccgccccactgtcttagctacggcgggtgttgaccgtgctatcaggacgtttgatatccgggccccgcaacaagggccgcttgccattatgctcgggcatgaatatgctgtgcgaaaagtggcttggtcgccgcatctttctaatgttcttttgagtgctagctacgatatgacttgtcgagtgtggagtgaccggtcggacacgggcccgggcggggatatggatatgatgcgcgctggcccagtgatgggtgcggaactagggcgcatgggtagacataccgagtttgtgacgggtgtggactggtgtctctttggaagtgagggctggtgtgctagtgttggctgggatgagaatctatatgtgtgggatgtgcgagccacgatgtcatagaatttgacaaatcaaccaattatatatctctggcagggtccgaggcttatcatttttttccaatcgaaacggagctatgctatgtaggattttactggacacgtgtgtttaagatatcagattgccagacagcctgctttaaacggagtgcataacttgaaagggatattgatcattttatttcgtattatatgccagagaggctaaagatgcaatgcgtggtgcgatataagaacaaatgcgtcactattgcctattcctcaggcttaagcattaagccttttgttctgaaccctgcagtgactcaatgactccgaatcaagataagaggctcacaatcttgagagaaacatccatgttgggtatttgggagcatttagactcagggccatggtcagtgagccaatatatcgacaacctcccaataattcatgcgcctgaatgcttatgatcaagtgacagacccatctatttgccgcccagtctgccctcgaccttcttgcgctcgctatcccgaagggcagcaacctcttccttggtagcattgacagccgcgtgcacctggttgaatgggttctcctcgctcttctcgaattccttccggcagagatccatacgctggttccggcgcagaccggggttttcctgctcaatctctggcaaacgcctctcctcaaatgcggcatatgcggccttgaatcggcgctccgggtgtcggtcgatcttggatgtgtccttcgaggctagagacagggcatctaatgcgttatcgataccagtggcgctgagagcagattctttcttgctgcctgcaggagcatcatccaactgtgaaagatcgaggccgcgagtcttcttttgtgcggtcttggcgtttgcgcctttggctttggctggttgggaggcttcttcttcggcgagtagggcatcgcgctctgccttcttgcgggcagcctcagctttcttagcctcaacatcctctctgtagattgaaaatgatcagctcggtactcgaggacatgttctccttgagagattgagttcacatacttcttagcactgctcttggatccctttgtccattgcttttcctcctctgaagccttcttctggtcctccgctgccttttttgctgctgcggcttccgctttctgtacggcactatcagcttctatccaaacgatcttatgcttgaggggtgtggcaataatagcgggggcggggttcagaaaaaacatacacgagcgtttccggcgaccttcttggtgttctcgcctgctgctttcttgcctgccatagtgaaatattaggtccaaactatacgccggacagatcgagcaatggatatgaaaagaaaacggtggaatcgagcttcgactataacttacatgatctgatctgcggaaccaatatgccgattccgatgaaggcggtgactagtccgtgcgtcaatgttggtgccttatgaatgtggcaactgtcgaagtttccccgacatttgtaatctcctatctcacctaggcagcttgaagctgtctgtcttcttccggccatttgtgctatggccctgatatggttcttatgattgataattgtggcctttgacttgatttatactttgtcgctgttgatttcatttaccgattaagcagcgtcctcctccctactagtatgacctgatcgtccgtcacaatggctttgctcttccgctttctacaggcgttcgccttgctgctccttgccagcgcagttgtcgctgaacacacctctaattgggcggtacttgtatctacctctcgcttctggttcaactaccgccacctcgccaatgtcctatcactataccgaaccgtcaaacggctcggaattcccgattcacagatcatcctcatgctccccgatgacatggcttgcaatccccgaaacgctttccccggcaccgtttacagtaacgcagaccgcgccgtcgacctatacggtgacaatatcgaagtggactacagggggtacgaagtgaccgtggagaacttcatccgactcttgaccgaccgcctcgacgaagatgtgccgcgcagcaaacgcctgggatctgacgccggcagcaatgtgttagtatacatgaccggacatggaggcgaccagttcctaaagttccaggacgccgaagagataggcgcgtgggatcttgcagacgcgtttggacagatgtgggagaagaagcgctatcatgagctgctgttcatgatcgacacttgccaggccaatacgatgtacacccatttttactcgcctaacatcgtggcgacaggctccagcgagatcgaccaatcttcctattcccaccatgcggacaacgacgtcggcgtcgctgtcattgatcgctggacatactatgttctcgaattcctcgagacacaagtgacaagtgtcacttctaaactcaacctgggagatctgttcgattcctatgatgagtcgaagatccactctcagccaggtgtccggtgggatttgttccctggaggcgagcaagaaggccgtctgcggactgtggttgacttcttcggcaatgtgcagaatgtggaagtcgagaatgcaaacgccacagagcctggctccctcaaggaagatttggctgagattgcgcgacttgtggagaagtggcaaaatcgtgacgaggaatattcagccatgctagctgattccgctacaaatgtcactgaagacctgcattcatcgtctctacatctgaagctgaagagcactgttgggccaaccaaaatggcggaagacagcagctggggcaagcggctagttggcatctctgtcgtcggtgcatgcaccgctatctgggtggctggatcgtttctcggccgctcgtctgtttaatattatgcaaaaaagcatctggttttctttcctttggctgcaatcttgagttttcttcccggactcacggattcatggttataatgtcttcgttggaatagttttggggaatatagcatattcatggcgaaaggcgttacctccgcgattattgaatttgaagatatcctctgatgagaaacaaccatgcctttcagacacttaaccaaagtaataatcctagtaaagatgcaaccaatatatcgcaaagttttcgatacatgtcactccgggcagtgatgttgttcgaatctgattacacggcttcattccttggtcattttgagaatataaagtgtacaaggagttgacgaacccacacccggccaatatgaaaatttccagacttgggtttccgaatgtattctcacatcacttgctctaacgtacgatgactcactctccatagagcagagcaatttgaaaataattgcggagcgaagcgaagcaattacaaatcagaaggtcgtacgtacgtgtcacgtggccaagttttctcctagggggagaaataatagcgttttaatgcagcgtcaggtgaccaggtaaggtcacgtggccaagtttctcctaggggagctgaattatgacttatgacaaaagcaggggagttgatctagccgaggggttgctgtgaagccggtgggctttgcgcagcattagaagttagaattagccgctttgctctgcaacgactatctcgtaggccggtgagatcactcgtaatatcagaattattagaggagcgacggactggcacgtcatacttaaccagctctttccacaacacaacactcaacccaactcatctgtcacaacactcaacccaactcatctgtcagtacacgcaatcatcatgaatccacggcgtgagggtcaaagcagcgatgaatcggcgacatcggaagccctgtccatcgcgcagaacgccagaatttctcaacagttcttagcaacaaacctcggactcctgacggattcggcaattctccaacgaactcttagcttgaattctgtcatttcgacgacctcttccttcagcatccgttttcagaatgcacgttctcgccccgacttacaaaccctcaaccaaatcggagctggcttgcagggagctgtatttgagcaggtcggcaagcctctagtactaaagaaggaatttcctggaaacgaagacctgccatcgaacctcgatcatgagtataggatccactgtactgtttcggctacattcgagtattaccattccctcaacagcgaagtccacgttccaaaaccttacaactttatcttcaaagaagagaataatgctttctgggatgagatcttaccaaaaatccctcaggcctatcgtatacgtggagaccttatgatgatggaacggattcttccgttaccgaaagtcgtgcgaagggccttaatctcccagttttatactcctcaatacctcaataatactgggattgaggctatcctcaatcaccctggaaataagcactgccttgcccgtgtctatcttggtaaggcaaatggtaccattgatcaggagactccgctacgaaatttccctctgtaccttgagccgatggagcagattggcatcgagactctcccgcttgcaaatgcgatggggaaagcctatgcaaccctacattgggccgccgccatcaacggtgatgatgtggagtttgttcttggaacgtcagccatagctcccgagggaagataccatgaacccgactttcagcaccgcgccgttcagttatatctcttggatttcggacaatgtgagacggtagacctcacccaggaccccgatattgtctatcaagctttcaagggagctatggtgacaggggacaatcagcgtttcatcccgcattacttgaagagcccggaactgttcgcaatattccgaaaaggatacactgaagcgggcaatagaattctattagataagcggttggaagacaagttcaacatggaggacttcatgcagcagtatgaggagtatgctgaggacttcctgtactagcttcgttgcaatgactggggagctgatagctaaacttgctttaccagaatgaggagaatatctttatcaaaaatacatttaaggatgtgaggtgccagattgatcttgaagaagaaagagtacattcaactaaataacgaagatgaagacgcaagttgcaaggtgcgaagcagcctgttgatatagccatagtcgtcgttgcttaagctagtgaaattcttacacattaactacgtagctagttggcttaataaattgctgtttattgaacgtattgcggagcggtatcccaggctgagctgggaacacaggaattaagcacatctcgcatgatcacatagttcacattaattcgcaggcatttgggagcctgaaatgactcagtcgatctccttccagcctatggcaatggcgtgtgcaagaagtcatcatcgctgtcgtcttccacgggcacatcctccaccggcttgaactggatcattatgtccaacatgatcgcctttcggtcgctgccgatgaccggcacccagttacactctcttatcgaatcgcttcccggagcgtgcatcatcggaaggatctggccggttttcatgtcttcgaagtcgaaggacatcagacactgtgtgtaacggtaatgatgtacttgtctcacaaaggggcctgagacaattctcatatggtcatcaagcctgtacttgcggaggcagcaggaacgaaccccagtcgatacctgcaagcaggtcttccacgtatcataatcgacaaagtccacaatcctgtcgtacagctccagcgggagaatgcctgctaatttggatgctgcgcggcggctcgaggcaacttcgaagaagttgacaagtgccgcgagcccagggaaatggcgttgtagtcttcggattgtccccttgcagtctgagttcaccgtgcgtttaccatcccgattctgagcctccattccaggcttcagctctggtcgctggcgcggatgtgtgctcgcgcaagcatctacacgcagaggcgagagcttgacagctttgctggctttggcgaatggccccgcctcaccatcaaaggagacttctgcaaatgccacttcaaagagggataagatgacaatctggaagttggtgtgtccgcgctcgacaccccaggcaacggcctttgagatggaatcaccgtcaaccaccagtgcaagactgacaagcacgtcctccacccagtagatcgtctccatgggcgatgcccctggaggctcgcctggtcgatgagctggggagccgaactccagtaacggagcgctatcgccaacccactcttcgtcaacccatccaggtaatctgtgtaagtggctcgacttgcaggtccatctctggcatgttcgagggttacactcctgaacggggaaagaatggaatttggtctggccagacgcaattgacacgagagcaaaagtcaactcgcgaaaagggaaggagctcgggctccactcctttccaaacgtaataatctgcgtctcgtattgactgatagtatcggctagaacttgtgtgacaaacgccttcggtgcctccgcgatgtcggtcctcggggatacaatgcggaagtcatatttgatgtcccatgttggctcgggatactctaaagccggtgaggccatgtgctcttcgggacagatttcaggcgagatggtggactcgtaccgatagatgctgcctacaatggcacgaagccataggtcgtcctgacgcgggacattccccagcttccaatgtatggtgtggttcatagtgaggacttcatgatcgaggttgatgatgtagatgtactcggcccagttattcagctctgggaagtcggaaggaagcgactcaaactcctcaaactgcgaatagtcgggtttgacgccgtcacggatctcatagacatctctatcgagaacactttccttggccgcatactgggctcgcatcgactcaagccatcctgcaggcattagtatagtgtaaagcaagatctttattcgcgccgtactgttgtatttctcagggtccgttgggatgctcgcgactatcttagcgccgagaccctcaaagtaactgtcgaaacgatgccagcgaatgtagtaacgcccgcgaaagcgtactatctcaagacctcgtgtgcccattgctgtagctggaaatttgattcttagctctcgttgacagaaacaaaaagagctatagttaccaagtgggtggagacggtgggataatcactgtgggtcacgacgggaagaccctcagggcttgacccacggggttgacaggatcatcaaacaagacaaacacaagcatgtgactgggtttagcgaggttggttcattgattgatctttacaagcttcaatgttggaactctagttccaagtacatatgcattaagtagtctcaagcgcttgatgggtgtatcagaggaagcaggtctccatcatttcatcttccgcataactatcaacatcagatggtctgtaccttcttcaatgtctcctttaccgtctcccgatgatggttcctgaaaagggctgtgtggtatgttatgcctggctagttctttgccatcactgaccatgtcaaagggagtcttttaggtctcattatcgtcatttgtcgcttcttttcttggtatgagagatatttccgtggtaaaagccgctgttgcatgtcaaatcgtggtcaacacatgaacaacatgatcttctgaatcatctttggctttggcttcgaagagcctcgccgataatgaccgatatctcgagcggagttaaaaagacgctccatacctgcttctgtggctgtaattgacatgatatctcgtgcaaggctcgcaggtactgagaagttactgctaaccgtcatctcgatattcaatcatacatcatgtctttaacagacacaacgttgagtggccgttcaattggcaacaatttgacaaccgccggcgaagttagaaagtccttgatcaactcaaggaatgtatatcgactacattgacaaggcagcctctggctcaatacacgccttctccgtttcgacatgctactaggagaagtgcaagcactggaacaggggtttaatatcgataattgatctgaccgccgagagatcctccgttcctagagagacggtaggaaacatgattcgaacaaaggattttcgcgtgagactcaatttaagagtatagaaaaatctagcgtaaagcacccaatttgcaaagcatcgcgcaataagatgaaccaacatattctgtgaaaatactcatattaaattcaaggagttgaggagtaagacatttaaatagtgaaatattccgataataaaagaatgggagcaaatatcgtcgaggtgatgaagaggtatggaatcccggcacgtgcctccgacgcgtcgcgcttgtccacttccccggcgctatgagagactctttgctgcaagggcttcaccccaaataaccacctcacatttctgggcttattcttacgagttctctttcttcatgagctgtcgcatgagcatatgataatcccaagctggccatgtatctcccacggcagctcatctcacacctctacctacaactcctccgatctcaccacccgctttctccacccgtcctgattctcgtggcattagagccagacgcgctatgtgcctgtcgaattctcacttctttgttgaaacgcgactatatcccccataaaatccaaccagttgcaggatatggcgaccttgcgcgtgcgggggaggagatggtccgcccaatgcagactaccaatgggggcagcggaggagttgtggtatgcctcggggtagggggactggtagatctggccgagatacttgcgttgagcaatcctgaggacgaggtggaagatatgggaggcgtggaaatctgggtattcgacgcgcgacggccgtggaacctgggaaacgtgtttggtggacaaacggggataggccagcacatgactgaaattgatgtcaattcgcgactgcgaggacgcggggttgacaaagggtgcataacttccgcttacacgtcgaagaatggtggcattatcgtgtatgacgacggagacatcgaggaagagcttcgcaacgaacgagaggcatactacgcgttactagaaatgccagaggttgacgaagacgacgatgatgcgagtgacgacggatctgaagacgaaacgcaaacagggtcaaaaaagcgcaaatcctggtcaggtcgcgaagacgatgaagattcagaaggcgatgagccgcctcaccaacggaggagaagcaattcagtaggttttaacatttttatgatccgacaatggactaatgcgtgatatagggctcctttattgactcgtctcccactcgccgcaaaaagactggaatcaattcttcgaactcgtcacgatctgtgacaccgacaactgactcgccatcaccagctgaggcaaaacaaccctcggcgcggtcattaaagaaacgtctaattaatctcaagcgaagacacgactccgttctacaagcctactattcgtctggaacttcatactccgaaccgatttcatccctgatctactctctggcatctgagcttggacgagatgacaatgacctgttgtggcttgctattgtcggtgtctccagtctagaactcagcggtcggacaatgaccggagtgggtatttcaaacacatcagaatcaggaggctcagcaggctggggtggccaacgtggtgaacacatccgtcaaatacttcgcgatgaggtgcaccgtttgaacccgcctgatcctttagaattcaaccgtgacattcgaggagagatcaacggtgtcattccaacaaccgctagatcacccaccgatacgtcgattcgtctttctcctgaaccccgattccttcttgtcaggcactggtcactatacgagagtatgctgcacagtccctatcttgcgccaaggctgcatgtatggactgagaatggccgcaaacgactgcacaaacttctggccaagatgggaattagtctgacccagtgtcaccaatactatacccacatggacatggaattgaagcgtgtactacgatcacggctgctcaagtacgcccctatgtatggcttagacggactcgtaccatcagcgggatctaccagtgcgagtgcccgtgagggctggggatttgtgcgttgctggggctggaaggcttgcctctctgccacagacgtaggtgttattgtgggtgcgatgctggaagttgggccacatgagactttggcttcctgggacgccaaacgtctgccacgagtgcgtgatgatgcagagaacagtggaatcacaggcgcatctgacttggccagtctgctgcctcggttctggagtgcctatgatgcgctttcactaacatccgaatcacccacgattcttctagagtctctgcccctcgcccaacacctacaccgtgctatccttcgcaccggtacctccctgctctctaaacatcaaatccgtcaccttcgagcattccgcattgctgtggttaaggatggacccgacgtcaaactcttcaccaaccctggggccttgacgaaattggccctgtggatcgccgaggccattcgagtccaagaaaaagagcggggggactcaatcaagatcggtcgcaagagggcagcgggaactcctctcgtccttgctggtctcgacgaagatcgcgatctctatgtcgtcgttggtactggtggcggcggcggcgttgttgacttcgctgccatgtccaagcgccaagaggaacgcaagaagaagaaggaagataaggagaagaaacagaaagagcgatcagagcgccggtccaagcgagcaacagagcgtgccgagcgagaagacgagactggtgccgaagactcagattcagaggaatctgagtcttcatcggaatcggagtccgaggacgaggaagatccgcgtggaaagaagcatcttctccgcaaccggtttggcattgccttccaggaggtagtccaggagacgaacgcccgtgtgcgaatcgacagcttcgagcattgtgttgtcgaggtccagaaggatgaccttggcggcttcctcgaagcattgagtttccgcagtgtggtaggctaaataccctctacgatcaatcacgcagtctacgacctgtcatctttgtttactttcttcgatgcatggggtgggagggatatatgggaggggatactggactttgaaaccggctacatgcataatgaccgttgcatgggtttccacgcttgcgagcattcaaacgcccttcattcttgcatctgtttccaatggcgtttatggtgtttcttgttccgtgaggaaaacatgtctgattctatctagtccatagttgcatcgaatctatgtattttcgaccttccgagagctgattattggatgcttctcatatagaataatcgagttattgcaatacttggaataatacatacaatttgctggtgtcaggttcgtaataatagcgtatcatctgacaccgttcgcaaagtaggagcacatcaatctcattccgagacatcacatcatcgtggttctttcacagagctgttcttttacccccaccagaagttcacgctaatcccagccctcagcccacgcacatagtgccaccacccaacaggaatgtagagacactcgccttccttaagaacagtctccacataatcggcgtccatgaacccaggccacatctcctcccatttctcatattcaacaggggaagtctcgatagccgccaggtccaccttggaagtgttggacatgtcaaccgatctacgagtggttggcagagccccggatacaggatctggctctgccgtctcatcaatagacgtgacccattcttggccccgtgggtggatctgagagtcaggcgtgtgtggcgagtacagccggatgtacttggtgcccacgacctgcgcgaggatattgtggtgggggtcgtggtggagaggggagatcgtccacaccggtccgatccaggtgttgataattgggtcgctggggacacccatgagcgagcctgcatctgagttgtgttcgtctatgacatgctcccttggtgctgtgtccaactgggggccatgcgaggtttcaggaacctgtgcttgaactttagcctcacgctctcgctgtttcttctcatacactggtgttcccggatctggacctggtggagtgatatagcagtagtctggtacactgatgtcgttacgcaaggcggggatttgagtaagtagatcgtgttgtgccatgtatgctgtctccccatcgaggttagtgacctggggctggttttccggcgcctcagccggagctaattttccttgccatatgtacttgtccacaaactctttgaatggcatgatcttctgtccccagtcctcgtcggtatacgaccttcccacctcaacggggaccaatcggcgacccccaaacgtgcggtcccaccagtagttgcgcgaagaccatggacgcgtcgaaatggctggccagtgttcaattgcatcttgtatcaccagtggggtgcggctgttttgaatgtgatgttcgatggaatcgaatgagggcgccgatatacgcgggatcggatggtccagatggggttcacggatcgcatttggagggaagagaggcggcgagaattttctgcgtttcgcaattggatactccggaccatcagtttcgtcgtattcgaatttatgggattccgtagctgcctgcagcgtggacaatagggattcgaccagcttctcgcggaggggggctccagacatgatcaggacgttatccaggatcgccacgacatctgatagccatggcgtgtcgggggagagcttcggctcagttgcattctttatgtcttgaatgagttgtgagacaactaggtgctggttttcaatggagatcaggccgcattttgtgatgatgatgacgcaggccttgacgatagacgcgtccgtgtagagtcgatgccagcagatgtgcacatccttgaatggaaaggagtgcagttttgagttggcgagctcaaatgctttctcagtgtcgttgaagagaagatcttgaagttcagggttgtcgcattggagaattgggtcgtcagagctcggcttggcgataacggacaacgcgtcactgaggactgataaaagggccatgactgagggggaggtgcaggagaaagcgagaacggaaggaaagaaagaggtgagctagaaattatccccaatgtcctccctaagtgtccccaaggtatggtgttgtggtggattcgagttcctcctaccgcgttcaaaatatatcccagaccctcatttgggcagtcaaatggagaaagaaatgaataccctattttttctatgtcatttaatacattagagctaggaggttgcctagataggatgaaactaaacccaggcatatgagagcttagattgcagagggatgttgaaggtatattgattttattatatagtacattttgttcaagatcaagggagttttctaatatacacgctttattcgagaagctccatcaccagtttaggaattcgagacaccccttcgcctcttttggcactgaccggaacaacacacactttctccttccaagcgcgttcatgacccgaggggtgctcaatcgagccattctgaacaccagacaagtactcctgcagagctcggaattggtcttgtgtgttttccaggtctgccttggttgccacgacaaaccaaggcttcaaatgcagaggtgtcatcaccagcggaggcagcgagccgtcggggttggtattcaagatgggggcgggctctcggtcaagtatctgtcgccgatggccaccatcctcagtttcattgaatggattccattcaatgatgtcgtcttcctcagattcgggatctgcatcgcgcattcgctcgtactctccaagttcgcgccacagtttctggagttcctctacaggatcgccgttgctgagatcaaccacaaaggcaagaatcccagctcggtcgatgtgccgaaggaaccccagcccaagtcctcggtcgagatgggcgccttccaccagacccggaatgtccgcaatagtgaagtgtgtgcgacggaccttcgactcaacaagaggacgacccttcatgtcgtcggtgatcacagtaccaatactgggggaaagtgtcgtgaactcccagtttccaatgcgagtccgactgttggtcaacgagcgaaggagcgtactcttgccggcgtttggtttcccaaccaatccgacatctgcaaggagcttgagctcaaagtcgagttccaacatcattccaccttcacctcgacttgcgaactttggtcgtcccattacgcgtgtggagaagtgcggattgcccagcccgccaataccaccggcagccagaagcatgggtttatccataggttttgaaagatccagccaaatcggtgccttgggttccatggctgctatattctgtcgtcgcgggtatgatttcggaaattggaccataagaaaatcagacggctttgcggcggggtgtagtacccagcgatcgtgctggatagggttgaactcgtcctcttctgtttcttcaaacccttcaccttcgccttcatcttcaccttcaatttcagaatcactaggagcccgccacacctttttctcctctttagcaatataggccgcttcttctgcggccttgatgcgcgcccactccacctcgaccggatcataacggctcacctcccgcaccacggtgccgacaggcacctgaaggaggacgtcatcgcctcgttttccacccttacttttaccctgtccgtttcgtcctctgctagctctgataatgcctctgcgggccagcttgtgaagactagtcaagccctcgacagtctggatgtagataccgcctccgctgccaccgtcgccgccgttcggaggtccctcttcgacgtatttctcgcgcaggtaggcgacacagccatgtccaccagatccagcatgtattttcacccggcatttgtcttggaaaatgaaccgcgaataatcctccggagaaggatccagatgcgacaggtctggttttacctcgtcagatacggcattttggctaggctgaggtggtgtttcggggtcggccttggtgctctgaaatcggttccgtgcgacgcaaggtttttgaaggtctcgtaggaataatcggctgcaacgggcttgtcttggaaggaatggtcgtatgggaagggaaaaatagactcgtgcatgcgccatgatgtgtgattggcggctatttctcgctcattctgtgaatgcagttcttgcaacttttgaaatagttcaagtcaagattagatcttcatagggcgcagatataccggttttctgtgaattgtcaacagagtgagttatgacttcagcggatttctcaatgtcccgataagatcacatgatgataagccatttatagtctccccaatgggtgcagaatatatggccataccttaaagttactcctttttaatccaattttcccatttttgcgaatccaaaaagggctgtgtaaataacatgccgctgatcagactcgatattcagaaggatttgccaaggaaaaacgagctgttcaaaacaatgcccaactctgcatctaaccgttcgcttgccacctcatcaacccatattatgagaagccgtcgggtttccacatctgatccgtagggtcaaaacaagtacagagtactttgctgcatctgcaagttgccgctgtgactccccgatctcgtgagaaagtgaccaataaacagatgcggattttacttgaatagactagctcaattttaatcctgtctgattgcgactcgactctttgtctagctttccctaatgttgagtcgctgacatgcagcggaggagagtaaaatacgtaacggtctgttgcctttgtttggtttaatactgtactgttatttgctttttcaacctgctgagattaggaagatagcagcttatgttggcggagaaccttgggaactatcaatgcatccatagatcactagcatgaccattactcaggggctgatcatcaactttgacgttatgacgacttgacttctcctatatttcacagccggctcaaattaatacacgaaagctttcgcaacagtcacaagtgggagaacccaaggcgcagcactctagtccggacggaatcaacaaggatatagatgcttctgattatgtccttgtctcggctagctgaactctttggttttgtttttgtgttcttaccaggcgtgttttacatggattcggtgtatccttgtttttattggatgtgtttaccttgctccaactgtccggtgctccttttttttttgagagtttctttctgatagctttatacaaatcagtgcctaatattgactggaatggggattacccttatacacaattcctcgggtatattatctgctcggggaatggctttctatcaattagttttcatcgaacttgactaaacaattatatgatctaggacggctctaaaatatattttgaattgccctaagaatgtactaacacaccgatttcatgttgccttggtctatatcgacataattattacactcaagcaagcacatacccgagtctacaatgtctttattcatgcgggaaaactcatgcaattaagtgaaaagtaggcggaaggcgagatacatggacgtacgtatatcatgcgcaacgtcggtagataacagtatgtagtactcgaaaatggcaagcgacataaattaagacataggcagatcgataataacaaactatgcagcggagagagattatgagagatgatttggaatttgagatttgagattaaagccaattccaaaacgggataggatcacacctctgcagtatcaagtacccgtgtagtggatatatcatagaggctgcattctcggtgttgaaaggtccgatggccctagctctaatgtcaattttagcacaggcaggaatctgtgacccgctgtcacatttatagcgtgattatggcaactgcagaagcgggaatcgtgttcaacagtgagatcaatcaacctatgagcaagagtgaacttattgtgaagagcggtctctggcattttctaggtttcttccactcaggggcgtgaaattcgctatatggcatgatccgagagatatgaagtgaaaataaagatatgggcatcagacgaaaacttgcccacagtactgtgcataagaagattccacaatttttcgaccaatcagagtaccatcaccatactctcaggagcaagagagggaagctgacagactagagagacgccagggaaagaacccaccagaaccgagcctcaaggcgatcagatcttggctccggggcgagcaaaagtactacatggggaagtctgctgtacttttgctaagaggtttagcactaagatcatgcgtctgtacggagccgttcgtatctggactctatctagatatgatcggtggcggtaatttttaggggttcgtccaattcggtaaactttacgagtatacgaagtagtctttggtactaattgatattgtattgaatgatctttgaggaattgtcttttagtactccgtagttagttaactacttaactatatgtcacgatatatgcatggacaacttgtttttatagacctgtgacctgtgaggctatgtattgtaccaccctctaggtatcattctgctgtttgcgtgggctaattatttgtatgaaatttctctggagtaatattcagatggctgagcaatcgaagtattaaactcccagctcgtcaaggacgcgcaagcggcgactaggtttgtgtattggctacttgggaaataatgatacgcaattcaaaaggagttattgctcgaagtctagatccaataaccagattttcatttaactagtatcaggtaggacgacaagttctgctcacggtagttatcgtatgttggccaagctataaatgggttgaaggtgggatgttggataatcgacaagataccaggcaggtgatcttgagtgataccattgagcttcaattggtttccagtaagaccacacgtgactgcaatgaactcaacattctgtgcctagactcctgcaggggaatcgatctcgatcacatcgcaaagtctagagtacatgaagtaaggcgggaagtacgtaagaagtgtatagatccagctgaccaaaagtccacggaattcagctccccggtaccttgcggggcaaaaagaaatcaataaaaaacgggaagaagaacaggaatgttcgcgagtagaatcgatagtgtgaaaatccttgcgaaaatacggagtacgagatgtgattcggatccactcgcggaacttttgcactgtacccgtcaccgcggcaccggatccctgctttccgcttgccacaagtgcggatgagggcgatcgttcctgttggtcacggaaatagaaaaaaaaagagaaaaaaagagatcggatggtaatatgggtacttcttacaataccaatccattctttacattagcccctctttgggaggaacctcgggagacactaatgtactccatatatccttaacttagtagtaccgtggaactggatctgtaagttccatggtttgtctagcggggaccccgaggtggaaggcgatttggagattttattggaccgcggacatcccgctcagctgccggaccagaggattcagctttcctcgggacgcacctctggaatgaaaaaccttggaagacacgcaaggcagctgggcaatcttaatctccaaggctaggttccgatcttgcctgtcagaattcgtacgtatgcatcatgcatgggttcggatacgccttgccggttcacaaaagtacacctgtcacttatactccatgcagctcctcgacaacctttagaaattagaatttcaatcttccccaaacttccgagatctaaagctaagccataaatctagatcggaaatgcagatgtggggtttagctggtacgaccagtccaaacaattaagttgaagattcagctatccatgatatattgtagtctatagtacgttgtacgtatacactcttcaaccctaccaagtaaggtcccactagtgtctagaatcaagggtagccgacatggataccgatctctagaaagagacagctaaacaaaccgtgtaaccgatcgccgcaaggttctggatcgggagtcgaggaagtaaatcgcattgaagcaattaaactcaaaccttcttgctcggtcgatcgggtagactgcatgaagctatgagttcccgtctcaaatgcatatacgtatgtactccatactccatactccatatattgtacggagtactccgtacacatcccaaggacggcacgaccggtggcggcttattaaaatagcaaggaataggaatggagcctgttttgctcggagttaaaccggcatgtatccgaatctacgtagcgggatcacacctctgaaaacaatgggattagactgatctgcaatgtatgttgtacatcgcctacattgatatgtatacacccttgtacaacatcgggagggatatgttggaatccttgtttttgcccgtcagcatagtgtgtagccccttttccatcgaatttgccatcgaagatctagactttgaatgacggaatccggcccacgggagtgactccaaaagttgatacatcacacaactgagttttcttcctcatcgcgggacagaaagggaagccgcacccagcaattttgccggagatctccgccaaatttgggacaggtccaaaatgaagccttcctatatgccggaagaagtttccattttgccggaattatttttcttctttgattggtttgtttgtttggggtttgagggggggcaatcggcgccacgcttcagccgttcgggaatctcgcgactgtcagaacccgacaatttggtgcggcgttctgtgtggatcatggacccttctgtctagattgggattgtttagcgtctgcaaaaaatttgtcacaaccgactgatctatccgaaaacggggctgtattcttaggggcatcgtatctcgccaaatgctacggagtactccgtataggttcgtggtaatcagatccgtggggcggcgccgacaagccccggtcatcgttgctgtggcggtcctcagggcgggactgtacgatcgatctaggtgtcgtggctgtgcaatagacgaggtatagtttgatagtgtgccgtggaggttgaatccacccccttgctattggtctcgatcgggaagtgttgaggtattattccgctgtgatgcaatatcttgctcactttggaatgaaggaaatatcaagggcaacagatggaatgtggtgaagatggttcatgacctcatgtgaaattaagcacggatcgaccccgacatcgcagtacatatgtacgttcggtcgaagctgtgaccaagtactagtagggcacggcgagatctcggcaaatctactctacggcgttatcaacatcatcctggataagtcggtgtcgtcaagcatggcttccaactgtgcgtgttgacttgtaacgcttcaccgtctttttcgaggcttcttgatttcgagtcaaaacgacgcggaggtctggatatcaatatgggctacatgcgcaatgtcggtccatatcgcaatcctcgacgatcatagttggacagtttaccggcggtgcagactcaaatggcggggcagaacaatacccatgtagggctcagcctaccacgggatcacaggaacgagtacggagtatccgagggagaattcaaggcaagacgtcaaagcatctctgcagataatcaacaggatgcagccaagagacacaccgcttgacaccggttaatatcagaccttgtcaatgcagactcacttgatctatgtccccctctctttccaaattggcgagaatcggaagaataaccttgcaggggttccttttcccccaccttacatggatgattcggttggctgcagggtaggaaaatcaaagactcacatgatctccatcccgatttgaatcgcaatatgtatgaaacaaagagaacagcaagcactaatttccgaccgttgggtcgcaattcttcttccgaacagtccgaatggatttcgaggtagacacgactgtcgctgacggagctacggcaggcacagtcgcgtgatgcatggcatggaaagatgacgggctttgtttcctgaatagcagtcaccgctatatccgcgttgaaataggtcgggctctgttagggttgggttgcgactcgcggactggacatttcaacgatttagttgcaagcgctcccaccttgtagccaatgacctctctggataggaatgcatgcattgggatcgacatatctgggtatttcatgcatagacggattggtcaaacaccctgtcagacctcactaggagcttgtattagcccattgtcagctgggcacggtcacctctgctttctaatcgaatgactctttttattgagcaatatcaccggcattctgtatgactggttgttgaaaaaaagtcaagagaagtgttgcatgttgcaggagccgccccagtcgggtttacaatgtcttgctcacaccgttccttgactttcctcctttggcatctcctacaaggcgcacccctgagaggctctagccgctaatacttgagtatgacgttgtagtttatttatttttttttcctttcgagttagatgatttctcaccggctttttatccactccctcgcgtggccccagataatttctgtcgtacagcaagaatcgaactagcgcatctcgtttctcccactatattatactccatatatcaagtacatatgcacctccaacagacaacatatattcgaatacaaatggtcccacttattcccaaccccttgggtcttatgcaggcccttcttgttgggtcggcactgtaccgactttggatagatcccatttgtgtcaacagatcgaaagtcaaaaggaccggagtaatagatagccagaatgtaccagcggaattacggttcagtaatccgctccacttcgccacaatggctgatatagttataagggggagaaaggggcggcattgttttcccctgttgccgatcgacgcctaacggccaatagatggggctcgggagtgtcggtgaatttctgacaagctcagctgattctccggaggcttctcgaaggtctcagaagccgtaatccacattacagtggctacggacgagattatttctactagtacggtgtgtatattgtaattcgacgccaagatgatcatcggatctccgagggtttcaatagcttctctttctatactgcttccaactccataggctccatctgtaccgggatggcgggattcgcgagaaacgctctggggagttgaaaacggcttttactgcggacatgcaacaatgcgacaatagacggcacggcgctcgagatgggctagagtttccctttcagctggtacattcgtacaccgcattttattcctagtatatcctaaacatggttgacctacatgtatgtttcgacccaatcagctggttccgaccttattagaaaagtacgcttctcctgatcatcccggccatctgggaagagtggataacatgttaggtttccgttgagtggagagtatgacgatgtgatgtttggtctcagtttcggagtacgaagcacatttacaattatagagagggtaaaaatcctgaaattaaattatttaattaaagaaccattttcaagtctacctggcaagtccggaactagttcaagcataggttctcggggagagacaccgcggagctatagggcgagatctatcatctcactattttgacactaaaccacagctctgggtacaaccaagtcgatcttccttaccttacgccatacgggtgaagtatcgtttagcgcccctcgactaataggcctaatgccgttccccgggagcccggcgctcaggaccgtgggtctcgacatcattttggtatgtatcagtcttgctcgttggatctgggggaatggatctgtcgaatcaaaggtgtggaaactctgtttttcctttttaattcgtttatattacctccgatctgattaatcgctatcagaatcccatttttaatttcttttccctttagaattcgcccggaagaacactacctttccccccgatggccaaaatgtaaataaaataagtccaatccctaaaagaatgacgctggaccgatatcttcctattggccctaacccctttccttacctccggggggattcttccgcttccccctgctctgcttaacggaaatgtcaggtttcgacctcagatccactaaataggataaagggttttcttttttattaaacggaaatcaaatcgaaaataaaacaaaaacacattaattacaataataaagaaatctgacccacttcgttcgtctttatcctgaatgtttgccaactgcatcctgtacagctgtaaccgaaatctctagttgtgatgctgaacggttgacgttttagttctttggcgcctgatcacttctatagacctatccactgtcaggacttcttattataatagcctcccctttcccggtcttttctttccctactctcttctaactactcttgacatctttcctcctccattgggtttatagatcctctccttcagcctcctcttgtcaatcttctctataaactccccggactcccttgccgctgtctcatacgcacatcgtccctgccttattggatcttgatagaatttaccgcagggggagcaatgctgaagccctaaaccgaaaagacgctgctccttgctccaaccacactagcacattctctcccttggcgactctggggaaattaagcaaacaaaagcacctttttatctggtactttgttcctgcttttcgtcttttttttctgagctatacactcttaaagggaagtggggtgtctttgagcctctgaaatcctttggtctgcttccagctcatttcgaccttctcacctcttctctctcgacttcacaatgtttcaactaccagcctgtttacagggccgacgctctcgcaatggctcgggcgataacttctctacattcccaattcggcaactattcatcttaggtaagtttggtacttttgttctgatctatgaaaaaaaaaagatatggtagccgcaaattcgccgcaaaccatatctatacacaatgagttcaatttctgacaaaggcaacagcactcgtccggatctgtgaaccaattgctttcatgtcaattttcccatacgtgtatcacatggtcgaatcattccatgtgacggataacgaccgtcaaatcgccctgtacgccggcatgatcacctcctcattcacttttgctgaattttcggcgggcatgttctggggccgcatgagtgaccggattggtcgtaagccagtcctcatcatgggcctcgtgggcacggccatcagcatggtggtattcggatttgcgcccaacctggccacggcgatgattgcgcgagcactgggcggcatgctgaacggcaacatcggagttctccagacgacggttgcggagattgtgaccaagaaagagcatcagccacgagcttattcgattatgcctttcgtgtggtgtcttggatcgatcattggaccggctatgggcggcgctttggcccagccctgcgacaactacccggccctcttcgctcgcagtacgctgtgggataaattcccgttcctgctgcccaacctcgtctgcatcaccgtgctgatttgcggcatcgtggtcggtttcttgtttttggaggagacgcacccggagaagaagcaccgtcgtgatcccggtctcgagctcggccactggttggtcaatctgtgctggggctcgcgcgtgcagcttcccgatagttccgatgtggacgtcaaggagaagtacttcgacgatgcacctcctggatacgaaaccgccgaatcatcgccttgcctgcgtcccgtcgatgacggcgcatcggctgattgtgacttggagggacagaagagccccgcgcccaaggcatttacccgacaagtcgtccttgctatcgttgcttacggcattcttgcatagtgagttggcccccttccccgctctaagccacacccttctgcccaatacgtttgaatgatttactgacctgcattgccctatttcagccacagtgtctcctttgatcagctgatgccggtcttattgagcaccccacgatccgatgacgaggtagtcctacccctcaagtttaccggaggcctgggaatggccacgaagaccattggtttcatgctcgctgtgcaaggagtgtactcgatgatcgcccaactgtggctgtttccatttgtcgtcaagcactttggtactttgcgcaccttccgcttcgttttgcttgcatggccccctctctacctggctgtaccctacctggtccttcttccggccaagttccaagtgcttgccgtctatgtctccttgatcagcaagatcacattccatgtgatcgccttcccggccaccgccatcctgttggccaatgccgccccgtcttccaaagtgctgggatctatcaacggcgttgccgcctccactgccagtctcagccgggcgtttggtcccaccatcactggtctgcttcactccaagggtcttggtagtggatactccgtgctggcctggtgggcctgcggtcttgtctgcctaatcggcgccatccaaagtttctggatggaggaatctccggaacctgagcgcttcaagactcgtcagcccgaggtcagcgaatccgagatgaagcgtgaagccatcccggacttcagcaaccaggctgaggactctgacgagctcccagaggaagagcagcggttgctttccttgcgttctagtgtcgaccatgactttgacattacggaactcaacttgaacaccgtcgataacttccccaagcctcaaggcgatctcacccacgataccaacgtttaaaactgcgaagcttgcatattttgcagcaccaccttttactttcttccatgcttctggaaggcatattcatttcagcgctaaggcgcaacgcggttttcttttttgtcacttttttcttttccccgtcatcacgatacctcactctgctatttcattctcatgactttgagaccgggaaacggcgcaattatagatggttgcattgcgtatgctgaagcataaaattttgggtctcttcttttctttcatgttatcttggagcatcaacaggttatattatgactattcatgtgcatctgggaggttattttgttattttgttcttcgatctgtgttctctcgaatatcatgtctctgtcggttagagtatcttgctacagactgctcaattaacggccgtcatcttctctatcaactttgatcattttctagccatgtagtctcatagtttcatgcctcctagcctgtttcactccttcttgcgctatattctagacaatggtttcactacaggctagcatatgttttccgacggtgtccggtcgattaagcaattactccttaatattgacaagatcatacggccagcatgttttataaatccccccctccccgctgttctccccccgctctcatccccctcatgtccaatgccttgtcgtaaacctgacagcggggagtgggggaggtccaccaaatctccctagatgaagctatatcagattcaatcttcattcttcaaacaaaggtcccgtcaaagtctcatcgaactcccatcaaagtccgataaagtccatcaagtccatcaaagtccgattggagtccgattagatctcggcatgtcagagcctgggaaacccgagatctcttcccggggtaactcaatttcccaactccgccaatacactctgactatggtttcttctcttcctcatattctcacaggtctcgtctatggtcgcgtgttgcaattatttgctcggaggataatctaattccgaggtttccgttttggggccaatctcttttccattcgatttgacacgattggcgcgattggcacgataaatctccaatcaccgaacgaaacatagacgaacactaaaggtatttcgtggtcttatcatgttgatctgctctgggggagttaaatcgcagttcccgaccattgtccccgcaaaactccaccaagagatgatcgcgactctgcggctctcgtctctcggttctcacaatgcctaaccctccctcgccgctatcaccagtctcttcaggcaagaagagaccacatccctccaatacccccccagcccaaactgaccccgcgacgaattctgcttccaatctctccgccccgacagcggtgccctccacctcgcccgcccattccatcgtccccgcctcgtctgcttcctcctcattccgcaatgtctccgcctgtaaccgttgtcgactgcgcaaaaatcgctgcgaccagcgcctcccgcgctgtcagtcatgtgagaaggccggcgtgcgctgcgtcggatacgacccaatcacaaagcgggagatcccccgcagctatgtctatttcctggaggcacgcgtagcacatctcgaaaaacaattagcggataacaacattgaaattaagaaggtcgtcgctttcgacgaggaggaggctatcaagctcgaagctgatggcgacgccgcgcaacctcgtcccggctcggacggccaggctggggaggggtctgcagcggagaaagcacagtggaggaatacatcgaaagaaaatgccggtcgactagagcggagaggagaggggggtaatcgtgacgcggacgatgatcctgcgaatgaggataattggcgcctgcataatctggtctcgaatatcggtatggtctctgtacagggtacttccgacccgcgttatctggggtcaacatcgggaatctcgtttgcccgtgtcgtcttcgctgcggtaaggagctcactacccggtaatataccggaccgtgcgattcgaacgagcgatcgattgccccagagtgctgcgggcactgctgggggtgggggtagtatgcgcgattccttcttcggactgcagacaaggccgatgatgaaatgcgcgactttccctgaccgggagctggctgaacggctggtcgatctttactttgaacacgcgaatcctcagatgccgattctccaccggggagatttcatggagctgttggataagacttacttgttagaggagaaaaagcgttctccacgcgcgctttatgtgcttaatatcgtgtttgctatcggtgctggcatcatctttgaggataagcctcaaagctcggatgatgagagtcgcagtagtcgtgaacggccctcgtctgggacgaagagaccgagactctcgagccatcagtaccagccggaggaataccatgcctcggcaatcattcatttggaatcattccttggttcgtcctctagcgagggctttggtggattggaagagctgcaggcagtgctccttctagccagctttgccctattacgacctgttgcgccgggtctctggtacatcgtcggtgtggccatgcgcttagccgtcgaccttggacttcattacgaggacggagcgggcattgactctgcaacgaaagacggcaaccaagcgcagtcacggatcgatgctcgtgaacgcggccgtcgtgaatgggtgcgcgatatccgtcgccggttgtggtggtgcgtctacagctttgatcgtctggtagctacgtgtgtgggacggccattcggcatcagcgatcaggccatcagcacagagttcccgtctatgatggacgacaaatacattaccaagtcgggtcttttaacaccgccggacggagcctcgacatataagcatgtcgcattccactacttcaaactacgtctgcttcaatccgagatccacgatgtcctccaataccaacaggcgcgcgctgtgcggaggagaggcgccggtgcagttattctcccgcacgccgagctttcctcccctttccttcagggctttgactcgttccgctcgtggcgttatgatgtgcatcgccggttggttgagtggcaagatactgccccgacacggccggaaacaggcgtgaggttctccattgagctgcttgagttgaattactggcaagctatcattttgctgtaccagcagagcttgacggttccggctgaattggtgggagagctgactcctgcggacgacgtttctagtccgtccttttctaatcctgatgaaggtgaagatgaggatcaagtctatcttaatgttgccgaggctggtcagaaggtcattcgtatctatcgccaattgcacagagtacgcttggtgaattacacctatctcgccacgcatcatattttcatggctggtatgctgttgttctttgcatttctttgcttcattactgacactcttatcaggaatctccttcttatatgccatttggcattcgcctttggttcgaagccgcttagtaggtccaacttgggatttaggtttatacttattctaactttgcctttcttagacccttgatgaagtcgactttactgttctcgcggcaacttctgttcttggcgatctgatgcacaaatgcccaccggctgaagcatgccgagatgcgttcgagcgcatgagcaaagcaaccgttcaaatgtgtttatctacaaccggattcggatcacaagtagacatcagccgtgtccacgccacatcaaacagcagcagctcactgcatcccggccggccgcgacagcatatggatcaacgacaccgcgcaggccaagggcaaatccgacgagcgactccggcacgcccgtcccgccccgtccccaagttcgatatgaacttagcagacctgttcaccgataatacccccttaaccgaccatacccgatctgaaaatagacccgcagggccatcctaccctcctcaagaatcggtagcccccaacttcacagcagaccagtcttcccggtcttatggacagcgcaatccgtcgatggattactatcccaagtacgagaatccaagctccccacaaccccacccgcagttttactacgcgaactcgccgcaacaaagtgcctcccccggtagcaatacccacggtcatgctttgccgcctgccgagactgagactccgcaagggatgagtcttgatttcttggattttgcgtcgggcgatgccgaaggccacggtaatatggaaggcgaagccaatcctgattacaatactatggctgcaccaaccttgggtcacaacctgggccagaatgttgggattgatcttggctttggtatggctatggatttccagcatgactggagtgagaatcccaattacgatcttttggagggctatttctttggtggctctggggctggcgcatctggaggggatgtctaggatgtctgttgttccggttcatttcttttgtttggtgtcttctctcgcatttctttcatccccctaccctgcctctttcttgtcaccttttccccaaagacctgggcttagcaagggttgtataattcggcctgtgatttttcttttttcctgcttttggataccatctagacacatatataccgatttacgaacatctgcaaggacaggaaataattaattctagggttaacaatagcatcgagaattatatagtatgttgtagttgccttgcattgctatgttgcttgcctcgggcagcaacggcgtcaaaacaaacactcccgcctttattttttttctcccaacaacacaattcctgcaatgctctccactcagtcatcgtggcactcaccgcacaaaagaactctgtagccctgttggctgcttcacttcgatttgcgcttggacccgactgcctgacctcgacatcaggtgcccacttcgatcatcgattttctattcaaatcacctacccccgcttcactcccccggtctcgctgaaaaagacctccaatcgccacaaacccgaagagcaaactccgaactgtttctcccaagccgagctctgactagcgtttttgaagtggaccctgcggcaaaccgagaccgcggagcatataaggaggctctgccctttccttttttttttttcccactgaactgaatattgcagcatttggcaacatttgacgactgaggctttgattttgctagggttacaagacattgcattcgtttttgttctgcttagtcctgttcaaaaggtcctgattgcgtgcaacgtgctctttacgatttaccttatccttgggcttaccttctatgactggacatgcgtgggaccgccgattatttacttgaacaccgactatgcaattcgagcctgttataactgcataagttcgccggaaatacacgaacaatatggcgaaatcagacgtgcgcaaagattactatgcggaccttgggctccagcccagcgcggaggctgaagacatcaagaggcaattcaggaaattaggtgggtttcgcgaagctatgttttgaagtgataattggggctattgctaattgagagggaaagcactcaagtaccacccagacaggaacccaggacgagaagtcgagttcaacgccaaattccaggccatccaggccgccaatgagatccttagtgacccctcgcaacgactgaaatatgacaccgatcgtttacgcgcaggatatggcaagtgctacggaccgcccaaggctaatacccagcgcaaaacacaaacccccacctatcctcctcgccctacgccagccccggcgtctgcaaactcgtacacaaagccggccccgactaccccgtcggctggcgctcgacgatacgcatctcatgcgcgtgccggcccgcaacaattcaaacaacaggacaatgcgcaaacaagggctgatgctttccatggctttaataatatgagaggaggacaggcagctggatggcagggcttcgatccttccactgggcgtgccactggtggtgtcccaggtcctggggcacagcgtcatccctttggaacctccgcgcagtctacccgtcccaagtctgccttcgaggctcacaactctcattccaacgcacagtctttcaagaagaagcagggctttgcgccaggggccgctggaggggacgagccgatggcccgcaacacctccgcctatagcagcaacagggctgaacggatgagcagccaatactttaagtctgctgtgcccccaactgcgaagaaaccagtatcacctgagccgcctcaacccaaatcacgccattcatacaccccggagttcgaacgacccagcagaagctatgcccaggcaggcaagggtgagaggactttcttctcaagcactggattaggacgttccgcgaccacgcgtaccccctcaggttcttcccatcaaaacgcccatacaggtaaagccagccctccctctggccggtctgggagataccgtagcgctagcccctcgcccaggcggaatgccaataactatgactctaccagctcgagtgaaggggaacagcctaggcccaaacccaaagctgtgccaaagagtcgactcgggccgcatcagaagtttaccgacttctacaacccaggaacagcaagtcccagaaatggtatggacttcaactccttccttagcgcaaatgggcttcgaaccgttcagctaccagatggtagctacgaactccattcgatgcctcggaatcccctctttaatcaacgtacccttgctgacaacaacggacccaaaggacacacctcggatagcgctgctttcccaaaaagctcgtatcggccggaccagcaatctactccatctggttcttcctcttctgtcaagtacgttaggtacacctattatcaagttgcttcgcgttatctgacggacaccggaattagcactgacccggcaaacaatcccaagaggccccagcccgccgcgtatggacggagcagcacaagtgatttgcacaagaagttctctgctgatgattggcgggatcatttttgtcagttcgatttcttgggctctgcctcgccaaacaaggattcactgcccagatcgcctgcctcgcagaatcggggccgtacaaacttccggaccggaacggctcagacatcagcaactggatcgccgattccaaatcctttcggtcctactcctctatatcaaacttcacagtcatcacagcaagagcaaccaccaacgccctttgcacaggcaaagttttctgcagattcatgggctgaacagcttcggaacctctcgtggaatgtaccagaggtcgagaaagccaaacaaacggcaaacgctgcgccgtctcgtagtccaaacaaacagcctagaacaggcatcaaattgcggaccgctccgcagcaggcaagtgttgctactgaagcagatgaagctaaagaaaccctgaatggccagacttctgggccagccgagacagcagcaccggacgttgaggagatggatatcgacgaggaccttcctactcagaatattccgccgagggccccagttgagaaaccaagcagtggtagctatcccgatgtggcttttcaggctgcaccagatgcgccaccagtcaagaagtccaagcttccttcgggcacagaagcccgcacccctctatttaacctcgagaatcttcgcaataccgtaccattcaccaatacaactggcggaggcatcgagaacctagaagacatccacactactctccccttcgaatcccaagccaagcagcaaaggaccacaagagatgacatccgccctcgcacactccaacttccaaacccacccaagcgaccctgggccccgaaaccagtcctcctggccccgacctccaagcaactcgtcctcccgcgggataaatggaactggtatgtctcagcaatgggagcgtacatgcatgaatggaatgcattcaactgccgcatactcacgcatttcaatgcgcgccaagacgcgaacgaaaccggtctttcgccgggctggatcggtgccttcggagactctacccgtctcaaaataaacggcgcagacgacgacagcaacgagggcacgacaaagacccgtaaagatcttgatgattatcacgttgacgaattcctcatccctggtaccagtaagggcggctttagtgcttatctccgtggcattgaggaggatatccaggtgcgcaagcattgggaagttgcctgtgagctgcatcgggaatgtatccttgatcttggacgattgagggagtggatccgggatggcggcaaggtggtttgagttttatcactgaatgttcatggtaaatggaaagccattgctgaagctgcatctacgttgcatcttcagcttaaatattgggaggctcttctccgatttgatctgacctgtttcctgcagtttggcgtctccgttcttctttcttttttcacttctattgatgtcttctacatgcctttttgatctctctctcttttgcgatgcataatgacttggtgttgttgtgaatacccgggattttatcacatctgcatagatttgcctgactctttcatcgggctctattattatcggtgttttctctcatggagttgttgaagcgggatttgtactaggtactaggagggtttttcttatgttgttcaagcttaaccaatccatcattatcccatggctttcgtcctctcaatgttctgaaggtaactaagtcgacctatttagcaaagttggggattactggtcagctataccacaagcagttaggccagtatatgaaattagcttgatttcaaagcttcaatcattccaagtcgagtaatatctagtacatacaacgttgcatctattgcaatgcgaaaagcctgggatacgttggaacccttgccctaaccctctctgcctcaggctcctcagatgaaagccaaggcatcaaggcaccaggcaccaggccccgccatcccgccggatctgtgacaacgggagttcacggaaaattggtctgactcactgaaaagaagatcaaatttgtgaaaaagaggtcaatttcatatagccgacgtataaattcctcgcatcgaattgttcctggccgaatttgccttgaaaactcacaccggcaaacttgaccctggccccgctatcggctccagacattctctttcgccttcgaacctaccccaccatccaaagcaattgatcgtgcataagtcggacttcgtgaccttttcaagcgtgcaatcatggtttcaatcgttctaggaagtcaatggggagatgaaggtaaggggaccaagaccagacagagacattcgacatgctaatgaacgaacaggaaaggggaagatcacagacatgctgtcgcagactgcgacactttgttgccgtgcagccggcggacacagtacgttcaactcgctttgcaatccctctaccccggagtgttgaagttttcaaacgagccgtcccaaaaaccaacagtgactgaccaaccggcctttttcaattggatacagatgccggccacaccattgtccacgaggacgttacctacgacttccacatccttccctccggtctcgtctcgccaaaatgtatcaacctgatcggtgccggcaccgtcttccacgtccccagtttcttcaaggaactggctgctatcgaggccaagggcctgaagggcgccgcccagcgcatcttcgtctctgaccgcgcacacgtctgcttcgacctgcactcggtcgtcgacggtctcgaggagaagggtctcggtggccgcaaggtcggtaccactggcaagggtatcggtccctgctacagcgacaaggccgcacgccgcggtgttcgcgtcggcgagatcctagacgaggccaccttcgagcgcaaactgcgcactttggacatgtcataccgcacacggttcggagacctggcatacgatgtcgaggaggagattgcacgattcagggtacgcatgaaaatacggccatttccccgttccaccgacgaatgactatggcgcgacagcagaaatggaaaaatcctgattttctgcatccacgtcacaacagaccgctgacaatctctaggaataccgcacactcctcaagccctacatcgtcgaccagctcgagttcctgcaggcgcacaaggactcgaccaacacactggtcgaaggtgctaacgccctcatgctcgacctcgaccacggcacatacccgtacgtgacctcgtcatcaaccggtctgggcggagccgtgcaagcgcttgccctgaaccccaccagtatcaagtccgtgatcggcgtggtgaaggcctacacgacgcgtgttggctccggacctttccccagcgagcagctcaacgaggacggcgacaagctgcagaaggttggacgcgagttcggcgtgactactggccgtcgtcgtcgctgtggctggttggatcttgttctgtgccgctactctcacgctatcaaccactacaccgcgctgaacttgactaagcttgatatccttgatgactttgatgagatcaaggttggtgtcgcttacatcttgcccgatggaaagcgcactactggtactttccctgcggatcctaatgtcgtcgacaagattcaggtcgagtatgttactctgcctggatggaagtcaaacactatgggtgttcagcgctacgaggatctgcctcctaatgctcgcgcttacattgagttcattgagcgtgagattggtggtgttcctgtcaagtggattggtactggtcctgccagaagccacatgatcacccgtgattaaatgcatctcttatttccttctgtttggttttttttgttctcacgagtgactgtttcttcgtgcatattgcgatacacttgggttgtctgatataagggttccttcttgtcccatattcaacggtttagattctcgaaaatggatctggttagaggcggccaaagtcttttactgtttattaccattgttccggtagaaagatgttctgtcaagatgaaaattgagtcctggatagaataatggcaaagaagtagaagatattgtacatgaaatcaaaagtgatggtcagatcttcgtatccagaaaataatcccgcagaacaaccaagtagagtgagtataagacaaagaggagagaagtctagattagaaacacaaagcacccaagggtgtataatacacaagacagtccgaaaaaaagatattggagaacgccgcccaatgccagaatggatccttcatcttttcacttttggctgactggtctcaccggacagcagccttgctatccatgagattcccagacaaattataattgctagcgttgctggcaagagttgatctctgattcaactcaaacttagaaccggaactcgtcgtcgttgaacgagcggcgaggaggacgcgacgagcggtcaccacggtcacctccacgagagaagccaccacggtcgccgccgcgagggaaaccaccgcggtcaccatcaccacgggagaagttgttgcgctcgccacggtcgccacggtcaccaccgcggtcaccgccgcgagagaaaccaccacgatcaccgccgcgagagaaaccaccacgatcgccaccacgggagaagccaccacggccaccacggtcaccaccgcgggagaatccgccctcgcgtcgctggcgggtgccgtcacccgcgcttacaccgtcctttcggttgagacccatttgctgcatcaatctagggctgagctcagggagggtttgcatgttgtaccccacggtgaacatctggttgagtgcctgaatggcatcttgcttgctgctgaagttcgcagtggtggtgccaagttggcccatgtaggacttgaccttggtagcaccgtcacactgggccagaccctcgttaatcttgttgatgatctggccaactggtgtctcgttagagtgggtctgggagagatctgtatcggcagattccaaagcatcgtccaccttcaatgggagacggcccaggcgcttccggtaagcgtcttgttcgccgcggtgcatgaacagccaaccttcaccctccttgccagcacgggctgtgcggccgagacggtgaatgtaggtctcacggtcgcgaggaacaccaatctggacgacgtgggtgacatccgggaaatccataccacgggcagtcacgtccgacgagaacaagataccctcgcgagccctgcggaagttttctgcgctgcgggttcggaacgcctgcgtgagacgcgagttgatctccagcattctcatgctgcccatggaagactggcggaactctgaagagcgagcaatggcgttaaaaacatcagcggaaaccttggtctcggcagtagagttaaagtaggcaatggccttgaaaggtctcaggtcctcgccgttatcccgacgcgtttgccaattctgagcgagctcaagaagggcgggcaggttgttctcaagaccgcgcgtgtatacaagcttctggggcaccctcacgtgggtgggaacttcatcttcactaacggtgttgacgtgcttaaagcttggcttcagggtctgacgaaccatctgcataacttctctgggaacggtggccgagaacatgagtgtctggcggtccacctttgtggggtcgggaagcagtgtctggatctcttcaacgtcaggagcgaaaccctggtccagaaggcgatctgcctcatcgaggatcagagtgttcagcttgggagcagaaacaccagtccaggggtccgagaggatgtccttgagacgtcccggggtgccgatgagcaggtggcatccctcctgttggatcttggcaagaccggcacgtttctgcgtgccaccaacagcggtctgaacaataagaccagtgccaaacgcaaccttcctggcttcaactgcgatctgttccgcgagttcgcgggtaggggagatgataagagcacggatttctgaaggagcagttctggctgagcggcggccaaccttggagagatcgacaccagggtcattcaaaatattctggagggtgggtagaaggaaagcaagcgtcttgccggttcctgttttggcctgagcaaggctgaaaaattttgcaggttagcggaccaatcagtgtcaaggtaattctgccaatcaaacttacatatcatcgcccttgacaatctcgttgatagtaagagtctgaacctcagtcatagtcttgaggttcatccggtcaggttgaatgatgttcttgataatcttgctgtgaatgaaattctccgccgccaggtcggcaaactctgtgattaacgcaggcttggaggtcttgatctcttcaacaatttcctctgcagtagcctctgcagtagccgcagacatcctcgggaaagaggaatggagtgatctggttgcatcaagagatgcaagagacgaaggagcttgccatttcggcagctggctagtcaaccgcgctgagattgaacgaggtgtagtagcgcgcaacgcgtgtgaaacgccaaatcggcgaactgttccaagcatcatgatagaatgctgatggaaaaaattggatggggggatgatgaagttgcaaattgcactcgggcattacaaggagaggcgcaaaaataattacggggtcacatgatccttatcgaaagataacatccgagataggagaaaataaacaatcgtggcaaacgcggcaaacacggcaaacatggcaaacatgcgaaatctgccaacccaacgacggatctactaagaattcttccatatgttgttataaacatgcaatgatttgggggaaaatgcctgccactagtaattgatggggtttgaatagttcctaggcttacagttctacttgcagtgaatatacagagtcactactcgattcaaaagagtaaagctggtagatgtatagctcaagttgtgaattcttaaatatatttgtatcttcatactgttcatccgagtctcgggaattttcttttggatgaattgtggcaggttcacgctggatctgaagcgttgtagtcgtattcaagagactagcgggagcatctcgaaacggtctttgcgagagagcgagagagtccttctaatttaggtcgccattcccgtagcgcactgatgatcgccagtgttacgagccaattcgattcagaagaaaagagtgcaattcagaccaaattctaagtacgaagaagaaagggagaaagagaaactatctgagtgtatctgagtgcgcgttcttcccttcttatacccttgcgtttgtcttcgcttaatttcgtccgaccacttaggaaggtacaaggacatagtcgttccttcctcgtttggcaagtacgaaaacgtgaccgttcctgcctcgtttggcaagtacgatccttcccagatcgtcacaggaagtagcctaagtatatagtcgaccctttgcaaaccttgcaaactttgagccttctcgcttagcaatctagcaaatatacaaacagcaataagtcagtaaatatgcaaatcgtcggaaaagcggccaggaagacggtggacgtttatagtaggcggtcagtctatgtacgaatatcgtcacagtcagtagttctttatcacgagcttcgtaattcaattctgtggcctgcataatgcattgttttggagaaaaaggccaccgggtgccagaagatgatgaacttgacaatccgttcgtccgagtaatggggatacaccttctcccaaaccccacattttggagggtcatagtgatattggcgttttggtgtctcgtgcatgaagatcagcctcttcttcatgtactccatccaacccctggtaatatatattggttgccactcaatagtgaaaaacatcgaatggaaatcgaggggcactgtccatataaagtctgaagtcgtcgacaacgtagtcgatattggatcccttcatgacgaagtacaacagatctttactgtagaaagaatcacgtacagcccaggctttcgcggtttgaccgccatgttttccttttcgtgattccttttgtcgatttgaccttaaataagccaataccgaaccgtgggagatcacactcgagtttcggtttggtacagaatcccagctcgtcgtgttccaatttcttcgtggaaaacaggctatcaaaagccgattatccgcgatcaggttggtagctttggtaccatcgaacctgccaaattctattgcaagaagttcacgaaaagcgagattctctgaagagcattctcgaaatttggaagctttgttgtaggatcctggaggaagatcaagttagtatgtatgctcgtcgagatacttgacaaaaagccaaattgaacttacattcggaacgataacaagcgactcaatcgagcagatttgttcattgaacattcggaatgtcgcatttgcagcgcactccgggttgagaacgcctctctccttccacttgatagcaagaaacacccattgtttctgatcgttgagggaaaggattggacccgttcttgaatggaagtagttttgttgggcggttgtgaagcaaatgacccgaagcttgatgctactgctgtataactagttagatgtcttggatccttccttatgtcagctaagagcatattcgaaaagtgcaaatggatagtaattacctgcaagactggccacttatatagcaatttgaatgccatagggcaagagatagatcaagcatagatatattatatcatatatgttgtgagagtttacgaggaagaaaattgaaatggttgttctattggaaaataagcagcccaggaatacatagacaatgggagccttgaccaataatatctgtaggtaaaaagcaaaagatgctatatgtaacctgccaggtcttgtaaaggaagagtgcactcagttcagaacaactaagatggagagaaagaagaagtaagttgtaaagtgggaagcagccagttaatatagctgacgacgttgcaaactttgcaaacgtcggacatctcgcttagctgtctagcaaacaatctatctaatgcaaactaataaacaatgcacatagtaagcgagcaagcaaacgagcgagaaagtgatagtgatccatgtggatcatgacagcaagtaaacaagcatataatagacaataatatagatcgtagcattcactgtctacattgaggtggcttcatgttatcagcatataagagaggtaactagttagttaggtagcagtacgtagccttagaaagaatggtcagtcatttctcttgattagaggttagtatagcctgttacttttcctattcaaaggaaaattgaatttacactgaagaaaatgaagcccaacttgaccaaactggacacaatctggtgcccatttcccggagggtaaacactatattttcggagatgatgttggttgttgtgcctgggtaggagtgcatatagcagtggatatttggaacttggaggatcaacatctctgaagatctggctatttttttataggccgtcatatttatacaaattgccgctcatttcagttactatgtacatcgtacagcgctatctgtctcttctcatcttcttccttgatgttatatgtcaggtcatgtgctttgatagtcaaacaaacaaacatgtcaaacacagcaaatcagacaaacacatcaaatctaaggttcagcctaaaccttggaaagcgcaaattatcttcgatagccgacaatgggagggtcagcattaggtagaaattagaaatgcaaaattcgctgaccaatacttttctctctgaatcgagcgctagagagatgccaacgaagtatatacgtatctcaggcttacttgctaaccttgcatacgcgcggagagcagatctcatctgtcacataagaccctcccttctcccgaaacaaaacaggaaactcactcttctccacttcactgactctatatcatggcccctattgatgtagttattgttggaggctcattcgcaggcctccatattgctcattctgtgcttcgtgatgtacctgatgcaaaggttgtgctgatcaacccctcaaccagcttcttctggaatattgctgccccacgcatcgtcgccaaacccaaggccttccgccccgagcagtacttgctgccaattaaggaagcttttgcaagttaccggccggacgcgttcgagtttcttccaggagttgcgacggctatcgacaccaccgccaagtcagtctccgtaaccccgaacgagggcgagcccaagaccctaccatatgattatctcgtgatcgcgtcgggcagcactacatctgccactaccggctcactcaccggcacatccataccattcaagcagtcgaatcgcgatgatatggagcagctgatcgagtcggcacaggaaatcattgcaggggcgaaggagatcgtgattggaggtgcgggtcctatcggtgttgagctggctggtgagcttgccgacgcagtggaacaaagcggcaataccaacaaggtttccatcacgattgtctccgcgacagatcgcgtgctcccaatgctcaagtcatccgccagctcggctgcacggaagcagctagagcacaagaaggtcaaggtcgtgacctcgaagcgagtcattggggtcgagactccggccgacgatagctccaactggactgtctcactggaaggtggagacaagctttcggctgacctctatatccccactaccggtgcgaccccgaacaacagttttattcctactcagttcttggacaaggacggttggatgaaagtgaacaacgagatgcgtgttcagtcgaccgacgggtcaaccctgcccatctttgctgccggtgatatcaccaacttctcgatgcgcctcagtttcaaagctatcgagcaagcgcatgtggcggcggccaacctcaaagcggccattgtaggtggtactgccatcaagaccttcgaccagggcgatagcattatgatggtcgtgcctattggtgaaactggtggtacgggacaaattttcggatttgtacctttcggcttcatggtcaagatgatcaagggcaagcactactttattgaaaaggccgacagcgtactcactggcaaggcttaggttatccccatgattaggcgtattcaatgatgcgaattttcagtttataatgctggtgcatatttccggcaatgactacatactgatgtaattaatgcataattttccaatccaagaatgcgaatgtgaatgtgaatgtttttatagcagaacaagaaagattgatgtatacttcatatagtacttcatatagcactccgtatgtaggtccgaaatacactccgtgcaacgtacaacgtacgtcctccataacccgctttatcccaaaatggccaactggtccgttgcttaacaatcgtgtattcggcttgtgtattaatcaacaattagcccatttggttgagatgccgagggtcacggttttcctacctaaaatggctgtctccgtcggcctgaggtgtcttggattcatccgttccccactgttttaagaaaaaactggttccgttgccacagttatgtgttcatcgtacactcgttggacgtacgttaggggcatgggtaggggaattatgcacatcaaaccataatctgtagaaagtggagtatattccctggagcatcaccatctcgagaagcttctccgtgatccatctggtttataatctgaaaagcaaaacggattggtatttcaaatctgatcggtacagccccgctttgttgaacagctcactcatcatataaagagctccctccatacttcgggggatttctacttcccatatttatctttcctactacacatatacaccatgtctaccaacaaagctctcgtgttcaagaagattcctcagggatatcccgttgctgggcaggacctagtaatcgagagcgccgactatgatgctagcgttgccactcccgacaacggtgtcgtcgtgcagtctctctacaccagcttcgacccctacatgcgtggccgcatgcgcgccgctgaggccaagtcgtacgcccccgcctttgccctcgacaagcccattgatagccgcagcatcggcaagatcgtgcgctccaacaacgccagctacaaggaaggtgatgtggtcattggccacgttcctatccaggagtacgttgccctcagcgagcccgagctcgtccgcatccaaaagctggacaaccccctcggcatcgaggacatccgtgtcttcctcggtgcccttggtatgcccggtctgaccgcatactcgtctctgtacgagatcggcaagcccaagaagggcgagaccatcttcgtctccgctgccagcggagccgtcggccagttggtcggccagctcgctaagcgcgagggtctccgtgtcattggatccgtcggctcggacgagaagctcgagtacatcaccaagactcttggcttcgatggtggcttcaactacaagaccgagaagcccgctgatgcccttgctcgtctcgctcctgagggcatcgacatctactacgagaacgtcggtggagagcacctcgaggctgccctcgatgctatgaacaacttcggccgtatcgtcgtttgcggtctgatctcccagtacaactctgccccgtaccccatcaagaacatccacaatgtcctcgtcaagcgtattactatgcgcggcttcattgtcggtgataagggcatgggtgatgcttacaccaaggagcaccaggagaatgtgcagaagtggatcaaggatggctcgttgaaggtgctcatccatgagaccgtaggcattgacaacgctgccgagggcctgattggcatcttctacggcaagaacttgggcaaggctgtcctgaagttttaagtgttttatgagattgatgaaatagcgagatgcctggtgcatatatttttgttgaaacattagctaggaggtattgaatacctcggttaggactgttcagtagggacaatatagatacctctgaaaatagtcaaatcgaacaaacgttatacaaaaagaacatgaacataccgtaagataaatatcaatttgcaacgaacaacttcataaagactacagatatactccggagccacgaagaagatacccgcagggctaaatggaggtttctcatagagtctcggccaatttcggctgggcggatagccatcgaccaatcaaatggcccgtaaaaggatgacatattgactcggattcccgagacctccaacttcatccgcttgtgttcgaacagcgtttctgcttcttcacatcatactctccactcacaatggcttcatttgcgcgctcaactctgctgcgacagactcttgcccctcgggcacccttcctccagaagaatgtcggcgtttcgcaggtcgtcgctttccatgcctccgctaagaagcagatcctgcccccgttgcctcgtaagtagaggccctgccgtaatgctcattgaggcattgccagtggagagatctattgaatttcgtttatgagcagttactaatttgatttttgcgacacagagaccattgacggaactggtatgtgatttccgcgcctttcctaccgagtcttccctctcttttcgatggcattgagtagaaatgcctgcaatgtgtggagatatgcagtcttcattgctcccagcgctcaattaatgcccatcaaatcgcaacaccgtatttcccgaagtcttcgatattaacctattccaatagtgaatgacgccgctcccattcccacaccccacccttccgagggcagctatcactgggattttgagaggtttgtgctcccttttgcgcactacaatgtcgacctctgcaaccccttccggtaaccccggcaagctcggaggaaaaaaccggctaacatctataccagactggtctgcgtcggcctggtccctctcaccttcgctcccttcgccgctggctccctcaacccggtcatggatgccgtcctgtgcactctgcttgtcgcacactcgcacatcggattccagtaagaacctccccgcgctattccgctattcccctcggtttaccccacatctgcaaccggaaatcgcaatctaacataactctaccagggctgccatcgtcgattacttccctccttcccgtgtgcccaagacccgtgccacctgcaactggctcctgcgcgcgttcactctcactaccgccgttggtctgtacgagttcgagacaaacgacgttggtgtgaccgaggctctgcgtcgcatctggacggcatagagtgctgttacggttccttgtttcagaaatattgtctttttatttcctttttatttcctgcttaccaatttggttctggtccatccaggcgttccgtcccgcctctgtgtatgtcgttgattgtttttcttttgtctctgagcccgaatctaatgatcagtgccggattcctgctgctcagggttgtgagctatagaaaatcaaatggaatataacccctgtacaagacattcttggtgctttttgttttctgtatagtacgtagtgtagatatgcaaccaggttctttgtacactttaaatggtcagtagtattcaatagagtacagtgcttctaccaacgtttggattgctttctaatataagttctaatccttttatccttttaaattctatcagaatgataatgtaaagacacaagtagacaaggctaacagcaaacaagaggatctaaactcatacaaaacacccctcattcatcctcgatctccccatcatccccagaaaaggcatcctcatcatccgccttctccataacagtctcaataatcttgagcgtcgccttgagcggcaacccaataacattatcagcactgccctcaatcttctcaataagaatcgacccaagcccctgcaacccataaccaccagccttatccgcgccctcgcgcgtgcgcacataagctaaaatcaactcatccgtaacatcgccatcaaactgcaccaacgtctcctcaaccatactctcaaccgcataccccgggtctcgcgcactagccaacggcgccatcgccacaagcgccgtgtagaccttatggtttccgacgtcacgcagcgagcgcagcatggccacgtggtgtgcttcggagcggggcttttccaggatggtgcctgtagacgggtcgacgacgacagtgtcagcggccaagatcagggctggctcgcccttggcctcgttgttgatttcttgcgcgtagactgcttcggcttttttcgtcgctgttgctagcacgtactcgagcgggcctaggcttttgggtaggtcttcctctgcgttggaggggatgatttctatgttcgggaggcccaggaaggacattatgtgcttgcggcggggggattgtgaggcgaggattacgcgcctgctgcggaggctgttgaggatggggaggttgagcggtggtgggcgtgggaggaggagtgatgcacggttggcttttgagatgggtttgtcgtaggcgggtggtgggtcggattcgggggcgtcgatgttttccatgtgggataggagggcttctttggagtctgtcattttgggcggttggtcgttggtgtggcgggcgatgcgatgcggggaatcaggtgctttctccgttcgcttgtcgaggcaaatggtctttgtgtgcggttgattgaccttgcaaggatatgcagggatattcaattggggatcccgactgtccacgagatcctgtatgttacaggtttgcgtggagtgtagaggctgcgtttgcttcaccctgcaggggctcggcagatatcaggcggtaagccgaagttcttcactatcgaattttgtgcagagtctatatcggtatatcaccttggtcaccactgcattaattcattatttcgtctaactttccgaggatatactcctttgtataatctggttggctacctaggaagtgcatgactgcaattattctccgtaacctgttcacgtgatgcgaccgaagtacgactcggtcaaataattccgactttaattgaagtaaggatgtcgctgtgggtgctcagccagagctgaaaggaactcgatttcagttaaccgttgggaaagaagaacgccccagttgcttcgcagcaacagccatgaccatccatatacattctggtaccaggagcagaaacaaaccagaaaaaagcttccatgtacaatgatcaagggcagtaggaagaaaagaagtaaaaagttgcggcactgcgttgataatcgttcagtgcattgaatgcggtggaggatgcgtgattggcttcaaatcatatgggaagatcaaatctgccgggcaacgaggaagccctgctgatcatttccaagatctcattcgtaatacagggctggagtagatagacaggaaaatgaaattcgtagcgtgggtataagttcatatggtccaaaatttgagaaaaacagctcggacctcggcacatgcctgcagccccggacccccatcgaccagcggaggggaagaggggccgctggataccgaaccaaagcgcaatgaaatgtcgaggagaataggatcacgttgggcggaaagagtcgtccacgcggccgcctttgctctcgatctctgcgatgagatcgtggcgttcttgcagctttacgtggatgaagtccacggtcttctgcaaaacgatgctctcactccgaccctggccctccagaccaggcaccagctctgtgaggcgatcaaagccttcgcgaatggctgcacgtcgtttttgctccgaggcaatatgattgctctttttttcttgatcggtaagacgaggcttgtccttgtcctgggcagatccctgcttggatgtcccattaggcgttgaggacgaccgatcatggtcatcgtctggattcatcgtgtgtttgatgactggaggtttttgagagcaactgaaagcgtatggtagatgcgccggttgtatacacggtccggggctcttagtatcgattggacgggatgtatagatgtccttatagctctgaggccccgtctagtcaaggcatcgatgagggaggtgattgtaatcggtaaacaacgctcggtggaagaatgtgaaggagtatgagagacacgggaaagcgataggaagcgataaggccatgggccaatgcggagtaaactggagggccgggaacgggccttggcaacttctaaacgtcatagatgggtccactgaacacatcttgctttttctcccgcccatgtcaattttgtcctcacaccaccttaactttccggtccaatttactaccaaagatcatcattccctcatcgggatttctacttagcgagactactgccgccactcatctccaatcttaaaccatctacctagcccacattgcgaaattatcaacgccgcggaaatcctgtaccaccatggccttggaaccgctccgcggctcatgctcttgcggtcgaaatgaataccaaatcaatattccggacgacgtgacaaaccatgccgaagtgtactttgacagcagccgagacaatcgtgggtaaaccaagccaagcttgccgatctcccggctaatatcgcatcctaggtcgatttcacggtacacctctctcggcgtggcttcgagtacctctcagctggtaccaatcccacactcagtccttcttccctgatgaatcgcactcttccattcgccgcatccattcgccccgccatgcgccccggactcagcgtgtcttctgtggctactgcggtacacccctgacattctggacggaggagcccatcgaagaagccaacttcatgtctgtcgcgatcggcagtcttctagtggacgaccagcacgcactggatgatctaagattgcttcctcgcgacttttacgaggaagctccccgtgctggtatctcgacctcatctgatctgacaccaacctcggagaccgcttcatcctcggtcattgttccatcgactactgattcttcggacatctcaactagtctacagcacggtataactggaggaattccttggttcgaagagatggtagaagggagccgcctgggccgtgtgatgcgtactcggcgtggtatgggagtcagtgacgatcaatcaacttcgatccagtgggaatttagcgaatggcatgatgatggaaccggtgcaggtggattcctgcagcaggatccggactcgagcgtactcttcaggggaaatcgcaagcgggtgaatcaggccgatactggaattgagtctccaacgaagcgagcagggtaatatctgcaagtcccaagcccccattgacgcgtcttgagcttttgatgtttaatgtaataaaagataaattgacgctaaagccttttgttttatttttcggacttggtgaaaatcagaggacggagagtaacagaaagacaatcaatactattcgctagagatcttgatagaaccatctagatcaaatgagtacatatgctatatccatcgctcttactccactacaatatagtttaggaattgatgcttgtaccccgccacacctgaaaatcaggtgcgccttcctaattgggtaccgctcctcccttgacaacagtcacaatctatagaatggaatgaaagacagtctctataatatattccgtcatacagtaagagctatataatatatatattatttggtatattaaggcttagatgaaaaatgtagtactaaaaactagaatctatgcatgtaccttttgtatggcctgcctagtaaaatgtacgtccgttgtagcccactcgcttgcgagaggatgtaatttttgtaacaaaaatgtaaggaccgataaaacaccttacaattaggtggtcgctcacgtatgggtggcgagccgtaatttatgtaacaaacgtaaggctgaaattttgtcgcacagcatacccgaaccggtcaagcgcggtccagacacagcctacaggggcctgaccaacgtctcttaatgacttcctaggctcttttttttaccagtgacaatgtacaaccctttgtcaagtacagatcatggtatactgtggtaaaccaagcaaaggatgcggcgagtgcaggtccaggaagattcggtgcgaccaagcccaaccggcctgttcgcaatgcaccagggccaagcgggactgctccggatatcgggaccaacaggccctaatgttccgcgacgagagcaaatcagtaatccgaaaagcggttgcggcctcgacacataggaaacaagcggaacgatcgcgtcgcagtgcaatcccagaaaggaatcctgtacggtctgggcttagtaccgcgccagtggggcaggtcttggacttccactctgatccacagcatatcaatcttgcgcgccagctcgggaatcgcccattggaggtccagccgtcacaggagttcgaaaccaccaaaaatgaagcaatctgctttttcctgcgatcaactgctatccccggcagtttcttgactactgagatgatctctgactctttggtacagagcggaggcactccgagtcagagagctatgaaggcaagcgtagttgctactgccatggctatgctctcccgggtaagagggctaccatcgcttagagatgtagcccaccgggagtatggatccgctttgagattgcttaatgccgctctaaccgaaatggaggaggcgaaatcaaatcaaacattaggcgctgtcatgctgcttgccaaatatgaagtacggaatttttcaccccctcggatggtttttgttgactccctgtttctaggtgatttcgtcaagagccccgaatgaaattgagagttggaccaaccatatcagtggagcaatggccctgctagatctacgcggcgctgataaacttaagactgacaccgatctccgcttgttcttataccttcggtatcagattgtgagtgctatcgatcactccttcgatcactccttcgatctcaagctaacccctcaacagaccatcagttgcctacaaagagacgtgcgcgtgcctgagtcactaatagaacaaacgaaaatcgcgatgattcttcagccagaacaagttcacggcaatcggctactcacgataattggaatactatcgaaccttcgcgcagacatctgcgccaatatgtacaacgagcaggagatcatatcagcagcgtcggctatcgaagccagtttaattgcctggctggcagctcttccccccgaattcaactataccacccatgtaatcccccccctcgacttttccatccaaaagcgactccgaggcataactccatacgacgatcaataccacgtgtactcctccgcctgggtctgccattcgtggaaccaataccgcagcgcccgaatcatcgtcagcgaaattattctctcccgtgtccggcgattatccgacagttcctctatgactttgttgtccgaagagttgcgtatccaatgcaggacacttcgatcgacgatccggcggttagccgtggatatctgtcgcagtgttccttttcacttcatcggtcaccaggtagatagggtgtctagtctcccgccgcctgaacactacgttgcgggccttgtgctcctctggcatctatttgtggctggggttgttgagaacccccaacacaggctgcgccgttgggtagtcaagtgtcttcaaatgattggaaacacgatgggtatcgaccaggcgctggcagtggcagatattgtggctgatgatcctggggttttacattccgtgaccgaggaagaagactctcactcttcagatcaggatctgacgaggcgagatctagttacgcctagtggaaatacttgcctcggggtatatagcgactgatatagttgtctttcttttttcattcttgtttattatgccgacaatttgtccgtttcttttgtgttacagcctagggtttgggattagcgcctcatgtttcggttctcattatgactcacgagttgtctctaacaaacaatcaaaggaaatcttagatcctctgttatagtccatcatagcgtccaacaagatcccagaaaaagtagagcaagtggtcttccgttcacgttcatcctatgctgcgcctcctgcattagaattgccgtatgcggggctgtgtttgctccgccatcagtcccaaagcacgcttccggactgtctgtgcactttaaacctcttcatacactctatatgattggttaaaaagtgacgctggagcccgataattttaccttaccctgcggttgcccggccctacgaatgagcgtctctcaacatccctgttaattacaaatagggctgcagtgagtcaaatctgcctcgcaattaatgatggcgatggccttttcgatctttgatacacttagggcggccactagattgaatctcatgtgttaatgtccgtgtgttgatcatgcgtcgggcgtaaatccgtggttggttagaagtgtgccttggtctatgcctctaccctatactactctttgtatattgggtttcacagctaagcccctgatggcagacagtagatataaagaagttgtttcccgggtcagatccttctagggcataccatttcaggatatctgagcagtctctaagacaagtctatttgacatatattcctcacctacacttcattttcaacatacaatcttcagccatgggtgtatggaacccgttctcaaggtatcggaaagagcgcaaggcagggacaaccattacagggaccacagtgaccacaccgacgcatcgtccatcatggtcccgaggccgtagccctaatacatcaaatgcccaatcgtcagaccgtccaccaccgtatcaagaagaaattccaacaatcagaatcagcgccccctccgaaccagaatctgattcccagtacgccttcctcggccaattccataccatttttctggtagacgacagttcaagcatgagaggtgagctttggaacgaagccaaagaagccatcgccgcgatcgcgccaatctgcacgaaatatgacagcgagggaatcgacatctacttcatcaaccaccgcccaaagcccaaccccaacaggtccaactacggctacggttatccctacaactccggctcgggctacaggcgcagccccagcggccatattcccggggccaatttcgactacaactacagcccgggccccagacgtccaacactcgatgccagcggataccacaacatcaaaaccgcgcaactagtaagcgagatcttcgcctctgtcataccctctggtggaaccggagtcggggctcgactatttgatatcctggacccatacacgaagctgctggaagcaaaggagacagagagacaagcgcagaagcacgtatcgggagttttggccaggtcaatcgagctggagccggtcgagtcggttaagccgatcaatatcatcacgatcaccgacggggtgtttacggatgatgccgagagtatcattatcaagactgctcagactctggatggccctgcttgtcgtgctattccgtggcaggttgggattcaattcttccagattgggaatgacgagatggctcggcagtatttggatgttttggataaggaccttggcagccggtgtcatgatttgcatctcagagatattgtcgatactgtttcttggcgaaatcgggctggggagcggttggaagggtatgggattttgaaggctgtgcttggggctgttcataagaagttggatcgagatttggagtgttaggtggttggtttctgatttatatatttcccatccaatcgcatattttgactgcaagtgcaaaagtgacatatcatctgcacgaggacgcgctgggggtggagaattctcggatataagtttgttagctgaatttaatttattctccatgaccaatgagagatactgcaggctttacttcggtatattagagctgagcttgcagctttgcgattttgtacaattcatgcactcggtagcaactgatctgttgatctagtcaatctggtcagcctaattgatccaaccgatataattgctctattgctttatttaatctaattgtgcaaagtggtaccttgcataaagatcgacgaactacaatgacggggctggatcggaaagatcgcaagccacaccatctgagaatccgagagtccgagaatctgagatcacatttctttctttcttcttcttcttataacaatcttataatttctcagatcagcacgcatcattgaacacttccagatccactccccatcacggccgaattttatgatcgtcaagtctctccgcgcgccgatctcctaaaaacctcgaattcgtctcctaacccccttctctctatttctctcattttcagccttcaaggctttgttctatcatttctacattccaatcatttcaaccgttttaacctcattttcctcccttgtttcaacatccctgcagcgccaagagccctcttagcgccggactccttacgcaggaacatcaccaacccgagtggtcggcgcgtcctccttctgctcccccattggtcaaccttgtcgccctgcacagcgtcggggaaattgcaccctcgcggttcctgaagcaatcagcctatttgattgtttggtttgagccctgtgtgtccaggccatggcatgttgttctgcggcgttgccccgaacatacctgaaacaaatcgtttattcttagacctgtcacttgaacttgaaacaggcacagcgtgcttccaccggctgtaattatagaaccgcctttgtcgagttggctttgtgtctgtgagctccggggcttgttttgtttataagctcggactttcagctgaggtccaagggtctatagaccgttcttcttgttgctttgcatttgtattctgggattctgtctttagcattttggtttctgattttgcattgttgtgcattttctttctctgatttgttctgttcatttgtgctattacctgccttgctcagcgatctctcttttgctctttttcttattgtcttaccttgcgatgatctcgactaccctcatgacttttttactgtgagtgcgcccagtgcaattgatatctccatgcgctgaccgcaattcagtattaccagaccagaggtccggtcggtcaagctgctcggatcatgggataatttctctaaacaatatgcgatggaaagagatgtgcgcgtcggtcccggaaactggagaggatgccatacctttacggatatgataggtgatgggccagacaagacccaatggcgaacagggggtctgaagatgggtggtacttactggtattatgtgaggctcaattcaagcatatgagatgaaagagctaacgaggaaaacagtatctactcgataatgacatagagtattacaacgaggcagagcctacgaccacaatgtgcccgcttcttccggggcaaccaatgaatgtgctaaatgtccctatcattttacctgacagccgctcacatggacgctcggtgagtgccagctcgcaaaaatccgaacatcttcggaccatgaatcccgaagacaagttcatgaatccgcggaagccgccgccccagcctcagtctgtacggcttcagacatctgcaccagtatgccgcgaaccgagccccgcacggtctgcgagtagatctccgatggctggaatccaccggagtgcatctcagccgcacggtgctcctcggaagggccataagaaagattcacgttctatgtctcctccgagagcacgagccattctagctgctttaaggcaacccgctgaggtggatagaaggttcgagtcagtgcaacatgcgaatgcttctaagctagcacagcggcagaaagaggctgttgaggatcgccgcaatgtccctggaatcaaggttaacaccggagttgcgattccatcttcgagccctcctgacaaatttggtctgtccaccatccaaagtcgtcgcgcgatgaaggcacccgctggggaaacggcaccgagccgtcttctcacagtgcagacgcgtccggatcccccccaaaccagtcattctcgcagcgtaacaaacggaaacaccgtcgaatccgacgaaactcgtgcgatcagggaagccctgaaggatatcacttgctctggtgactttcctactccaactgccgtgtataccaaagataagaggctccctacacttccaaatacgccatcttcggtcatggatgaagcagttcgcgctatcgacgagagagatagggagatggatgacgagatcccgcgcagttacttctccagcatgacagcaacgacaatcgactccgcccattctagctttgtacctgaatacagtcggttctccggatggagtaccgacactgaaaccgactacaacccacgcgaatcgatggtatcggcctcatctaaccatcaccaggacgagtcttcggcggaaagatggacaacaccagacctctcgcagtctggcgatggcgcaaccaataccgaccctaataccccccacctcactgtctactccaaaccctcatctccgaattcaccctggagcgtcggtctccctcaactcaccgtgtccctgtccacacctggcctcgacttttccgggttgggaatcgagaacatggatgaagtggagagcaaccccaagcgccacgctgctctatttagcgcccttgaatcaatggaggccttcgcgatgtcgcgcagccccgacagctccccgatcctgctctcccaagcttccagagactctgacatggagcaatatcgctctttcacagagccgaaagcagagtcgaaaatgagcgaaacttccctcgagcggattcggtcccgtcgtagcaatgcttcgttccagggtaatgctactatgcaggagttgatggatgagctcagttatctgaagaatctgatccaggctgacatggatggggtgccgttttgatgagactacctcagggattttctcatgttcttatatcatattactggcgctggtcgtcggtatggagtttatgtaattcgtacatatatcatttagctctcaatagaggagacattatatcaaaagaaatacatcagaaagaaaaacaagtctccaatgtgtaaatttaaccgacctagtagagagtagagtcaaattgatgtaaactccgtagtgacgttggtgaatccatatcaacagatcggacgaaacaccaaacacacgcgccaagaatccctctgtatccaccacccgcgatcaacagcttcagccaaaaagaaacagcgccacctcaattcttgaacctttgatgttctcaagaataataatgggctgaatgggcaatttatcttgaagaaatacccagaatgacagtcgatggcccccaactgacccccgtcggggagaagtccctaccagcaaaatgcaagccgcaggccatggcgtactgtcccacgatggacctgatagcgctggcgaccgaggacgaggaactgcgcgtattccgactcaatggccagcgagtgttcgggggttcttttggtggagatccgtacctaggcgaggatgaagaggacggcgagattagagggatggcgtggaaagggaatggtaagtttgaatttccttgtcgctgagctttgctatatctcttttcctataatcggatcttacccgtcttgctgtttatttcacgcgcgctcatttactaatgctacaccaggtcgccttctcgctgtcgcgtgtggagatggctcgctccgcatcatcagttcgtacaccgggaagacggtgcacaactatcagacctatcagcagaaagaggaacaacccaatcccactgagaacccgtcacccaaggcgacctgcgttgggtggggtgtcaatttcaccgatagcaaagccgcacagcggcacttgcatgaatccgcgggccaggtctccatcgacgaccttttagccccgggagtgtatccctccaaggcagccatcatgctcaaagcagacttgccaagagagcttgccttgctggacattgagagctcgctgccgaagctgagcactctgcctgcaacaggaggcgaggatgacgttttcagctcgcgcgcgtccctagacgccatcttccattcatcgaaagataccaatgactcggtcgatgtgctctccgtcgggtttagcgatggtactgttcacctgcgtatttttgattgctttgagattggctctttccctgtgggaagctctcccggtatccccgactcgtgccgtatcttgcggcatgcttcgcacccgttgagctctacacatgctctactgacatcgccggtcaagggagacactcgtggtccgcttgagcttgtcacgatggaccttcgctttattacgaagtctgggagatatctgtctcttcttgcgtcgaaaactactcagcttcagaatttgctccgctatattggtcaggtgcagcggcagattgagcttgagtggaagaatgcccaggagcttcctgcgcgcttcttgcgtagtgtcaatgaggacttgaaggaaaaatgccagtgtgattttatcactgctatctatcacctggtggtcactggtcattgcttcgagcccatgaaagaattcctcacggatattgttggagaaagagtaagtgagccttgccatttgggagatggtgtgctaatggacggcatagggccacaagagatgggataaagctgtcttgggcggctacgagaatatccggcgactgacacacgaatgtctcctcccagccttggagcgcagtcaagtacttctcagtcgattggttggattgtctaaattccacaagctaagtgatgtccttgggctggacacgaccaagcttaatgccatcgtggagacacttgattgtctccatcttcttgcacactctgttctcacgcatgccaacgaggaaatgggacaatttaccgctttctctagatggcttcggtacgagattcaggttcttaatagcgagcccttgtcgcagacacgggaagaactgctggagaaaagagacttgttcgatgtccctccaactgtgaagtatatcaaaggcgcattgaccaagagtgctctacggaacttcatccgccaacttcctatgatcggagttgttcagcctcctgcacctcccgctgataagtggcttccagatggccacgaccgctcgttcttcgatactttcaagtcacttcttcaacagcaacgcgagtcccgggacaggggtggcgatggtacatcgatagagacgcctaagctcaatgacttgacgaagcgtctggggatccagtttgagaaggtctttgaagagattgccttgactcagcgcagaggaattctctatcgctcgcctttgacgcttcactctgattgcgaccaagaggttaccgatctgactttctgttacgaggtagtttaagactggtgacttttgtatcgttctaagctaactttcgctacaggatgctatagaaggccagccttgctcagtatatgtcgctacccgatcagtcacatcaaaacatcaaggttcgtcatacaatcaatcatcaaatccagtttcttatactcacgcaaatagtctatatctaccgcatcgtccttgactcagtcggtggcgtcagctcaacaagaagtacctccctcgcaaccctcgacctccaaaacggcgaagtccgccaactccaattcgtcaacgacgacacactcatgattctctggcgcgatagcagtaagtcactcacacatcgacttcatattcctcctctaaattctgtatgcaatctaacaatctatcgaacagaaggatcctcccatctcctcaacttccccttccaacccgactcagcacaaccccaaagcgaagcaagccacccattacctgtagtccttggctacattgaatgtgacagcacgccatccgttccaaaacctactaccccgcccacgacactagatctctcgcctgaattccaccacacgagtgttcttatacatatcttcgctctacatggccctaaggcacggcctatccatgttgatgtcaatggacggaagggacggcgcgctatttgtgttttgtatggggatgctatgcggtacgaggttttggacctagatgctgcgatgggagaggacgaggacgaggaagacgatgaggattaccaagaggggggtgaggaggaagatgacgacgacgaggaagtcttcgatagtgatgaagaaaataatgagaactaggattacattgttatatgggaatctgcgtcattcacgggatatggtagatcaacattgcatcacttcccggtctagacctgcataacttcggataagaacttcaagtaatcctgaaccagttgggggaaaggggagctttatgttatagttgctggcagtgagacttatctgcgcttttctagcgtcccttcttccaagatatatatgcacctatactgtgatagttagttcgttgatagtattgctgctgccctcatttataccgaacgttgtatagtcagatttctgtcagtgagttatgcatattcattgatcctaccataccttgctttacaccctgaattctgtcatatttcaacaccttataagttcagataactataagtccagatggtcacaaattcaggatttgaatttattagattgtctcttaagcagcaaagcctcataaacaaagaaaatcggctatctaaaacttctaataagaagtatcagggttgttgatccattcagaccagttgaccctttggggtggcttagctaggtcgaaccagtagggctttgcctcattccagggtgttggcttaacctcaaaccactgacggaagccgaccataaaactataggctataaattagtaaatccctttagagcaagcacagtgcaactgataaggaggatcgtacattaccggaggcggaataccaaactaaatgtgagaacaaagggcaaatgccaataatttcggtctcactaaaaggggccgatgttagtatatatctataataggcaacgtggaatagaggcgttaacttcttcccgaatattgtggcgttgatcaacactcatatcccagaagacctttgcgccaagactatcccctagctaaataccaggcacttgctcccacgcaacgagaccaggaagccagcgggtacaagagcagagctctcttgctcctcttccctatatcctaggaggcggggggtgacttccgactgcttatcggtaagagtcttatatgctactagctcgggcggagtccacgccctagcttgcctagcgcgggtagtataatcgtcaaactctgtgcccaggtggggcagttgcttatatatcctaacgaacgcgattttgctagcatctccgtgtttgttgcactggtacttgacggaggcataggagatagcggagtggtcgggattttttcggtgctcgtgttcgttaacgcgcttgaggacaatccagcatcgaagacaatactacggagctcggggccccggaaccaggaatgctgcgaagtcatttcaattgataagactgaaggagcagggtacggaaacataatgatggcatggcgaagagggagcaagttgatagctaagtgatgtaagagaatggtgaactttatttttggcatcgtgagtgagaataatctaagagagtgttcagttggttaacttaagatagcaatacttcaatatgctggcaatcttttttttaagttatttctctctctcagtactataaaagaataatgagtagcagaacggaataggtacgatataaaatggcggtaaatgtcataaaccgtactccgtacagaggactttctctatgtagacctaggaataagctataatcctttgcttatttcgttaagtctccagttaagatccaagaggcacaaatttcatggtcaccaagctacaaaaatgcaacgaacacaaggtgaacagcaaatattgatcttctcagatgcatcactttttggtaaaaagtccttggctgcaagggagggacccggcctgaggcagaagatcacgtgtatatgactaacccctccacagggccaatcagagattgccccccgtagaacctcacccattgtggtctttcgtgcttcgaatctttgttttagtctcttcacatatcttgcacttctacagctattcccatctcctccagacctttccacccaattattgtgtgttgaaatctgggcgtgcactcaaggcaccttttcctctctgcttctcgtcgcggaaagacctagtgcatgccgcctcgtcatatccacaaaaacacccgtcccttcttcccactcttccacaggaaatcctctttccaccactgcttctatcgtggtgatcagcgagtgttgaacccttgattgatccgggtccagaggggttttaaagtcttttttctaatctcttctccacctcttttttccgtcttttttctccccccccccccccacatccctcatttctttgcacatcatggacgcccgtcaggtgttgcagagtaccctcgcgccagatgcggccgagcgtagcaatgccgaacagcaactcgcccacgctgcggaggttgacttcgtatgtgtctcctcttaccccccttcgtcctgtcacgagccatgaaagatttccccaggattccgaatactgatacttttgtcgcctgataggctgcctacctcatcaccctcggtcaagaactcgccaacgaaagcagccccgctcacatccgtgtggctgctggtatcgctttgaagaacgctttcactttccgggaccaagccaagttgcgcgaggtgcagcttcgatgggcccagagcatcaacgccgagaccaagtcacaggttaaagagcttgcgctcaagaccctgcagtcacccgatgctcgcgccggaaatgctgccgctacactgattgtttccatcgccgccatcgagttgccgcgtggtgagtggcccgaattgatgggcattcttgtccaaaatgtcgctactggagacgacgcactgaagcagtcatctctcactgccatcggttacatttgcgagtcgcaagatcctgatctccgcgccagcctgacacaacactccaatgctatccttaccgcggtcgtccagggtgctcggcgcgaggagcagaacatggatgttcgttatgctgctatcgccgctcttagtgatgctgtcgatttcgtgcgaaccaacatggataacgagggagagcgtaactatattatgcaggtcgtctgcgaggccacccaggccgatgaggtccgtgtgcaggctgctgcattcggctgcttgaaccgcatcatgggatcctactacgagaagatgcgcttctacatggagaaggctctgtttggcctgagcatcatgggcatgaagagcgaggaagaggaagtcgccaagctggctattgagttctggtgcacagtctgcgaggaggagatcgctatcgaggatgacaacgctgaggtaattaagcgcataaggctgagtgaccttgaccatgtactgatatcatgttactttaggctcagcaagagggcgttgaggctcgtcctttcttcggatttgctcgcgttgctacccgcgaagttgttcccgttctgctgcaatctatgtgccgacaggacgaggacgctggtgatgatgagtacaatgtctcccgtgctgcctaccaggctatgcagctttacgcccagtgtgtgcagggtgatgttattcagcccgtcgtgacgttcgtcgaggagaacatccgtaatgaggactggcaccgccgtgatgctgctgtcgctgcttttggcgctatcatggaaggccccgaacccagtgttctagagcctctgatcaaacaggccttgtctgttttgcttggcatgatggaggatagctctatctccgtccgggactccaccgcctacgccctgggccgcgtgtgcgactgctgccccgaggtcctcgatcccgaggtccacctccagccgcttatctcttgtcttttcaacggcctcgccaactcccccaagatcgctagctcctgctgctgggctcttatgaacgtcgcagaccgattcgctggtgacgatggctcacagaccaaccctctctcaaagcactttgaagacagtgtgaagtccctactgaccgtgaccgagcggtatgttccctaagcgataaccctttgattcctttcatctaacgcccgtacagacaagacgccgataaccagctccgtaccgctggatatgaagttctcaactcctttgttatgaactctgctaacgatagcctgcctatggttgctaaactctcagatgttatcatccagcgtcttgagcacactgttcccatgcagcagcaggtcgttagcgctgaggaccgtattctcctcgaggagatgcagaccagcttgatcagtgtcattctggccatcgttcagcgcttcgaggccgagatcaagcctcaggctgaccgtattatgagcgtgctgcttcaagtactgactacccttggcgcaaagtcgagcgtgccggatgtcatcttcgccaccgttggtgctattgcaagtgctcttgaggatgatttcatcaagtacatggattcatttagcccattcctgtacaacgccttgggcaaccaggaagagcccggcctctgcgctatggccatcggcttggtcagtgacattgctcgtgctttgaatgagaaggtccagccttactgcgacaccttcatgaacctcctgctcaagactcttcaggtaagattgttccttcatatatatcgagcttcatatatatcgaggttgacgtctaatgctaattttacaaacagacttccaccaaccagctcaagcctgcgattcttgagaccttcggcgatatcgcccaggccatcggaaccaactttgatacgtacttggcggtcgttggccaggttctccagcaagcctccagcgtgaccaccagctccgacctcccatacgacatggtggattatattgtttctctccgtgagggcatcatggatgcttggggtggtattcttctgtcctacaagggcactccttccagtacgttactcttcactctccacacatacgatctcaacatgctaattagcttgcagtcacccaactccagcctttcatcgagtctatcttccagcttcttcacattatctcccaggagagcaaccgcagcgaaggtctgatgcgatctgccatgggtgttattgggtatgtcttgccggcttctattctcgattaaatatactaactattcaatagtgatcttgctgatgctttccccaacggagagctcgctgtttacttccgcaacgactgggtcacttccctcgtgagagagactcgcacaaccagacagtacagcgagcgcacaattgagactgcccgctggactcgtgagcaagtcaagcgtcagatcaacatgggcgctggtatgtcgtaaagccgtgattatgtcttacctggttgattgccactgattctggtccggtcccgtctgccaaagcatctgccacccacttcgggcctgttggtgtcaatgccacaggtcctagggtcgcttgagcccacacccaatcggtgctcctgatgtgtacaggatagctgttctattctcgacgttgtcgtactgaacgcttgggcggtagcctcaaatccctctcccctttatttcccagcacaggattcccctcccataactccctttggtcgcgaactccgttcccccatacctttgctgctgctcaattcccttatgacacacattcgaatgagtaacctttcccaatccctgtacggccctgtctgattttcctttttcttcttgatacaaccctttcaccttttcatctttcccaatccccttctatgttgtttttaattagacaagaccccgcccctcgcatattatagcattgcgaatcatgtagcccaagaattcatgtatcccctccccctctactgtgctccccattcatgtatcctttcccctcatgtcaccccctccagaaaagagtcattgtcatgaaaaagctgtccctgatttcgtctcccttcctcgtatacaccgatatttgcccacaaccatgctatcaagctggaaacccatgtatagaaccgcccatctgaatctttcccgcggacggaataagtgaattatgctgctgatgagttagtagtagtaggagtaaagatgtttgtatcactatctgttttgatcttctaatggtgatttttttctttttttcgagctctcattttgcttctatactttgtattatgtaggtacaatctggagttccagatatattattcattgtagttatctggtacagttcactagttaacagaatagtgatgccttctaaccttcgaaggttcaggcaccgacatgtagcagcttatcaccacgtgaccattttctgataagggctacctcacacacaaaccctacccgcgcaccacccgaaaaccaaactttcaccgatcgtcagattcttccgcttcaaccatcgacgaccatctctcgaggtatgtgctatatcctcccccaacaacagccttccagctagtctggggatgcaatcatcttgtctagattgcttccttttgaattatagacaattctcaggaatcgcgatccaggaagccaagatgatacgcatctcccaactcggcacgggctgaagaactccttgcaatgcaaaaaaggggcactctttgcgctcgaagactagtggtggctgacttaaatcgccttcgtcgaacagatacctcataatccttacttttaaacgttacgatttgagaatctcgattctactaaaccgtcaaaatggtcaagacctccgtcctcaacgatgcgcttaacgccatgaacaacgccgagaaggctggcaagcgccaggtcctcatccgtccttcctccaaggttatcgtcaagttccttgctgtcatgcagaagcacggtacgtgaattttgaaattttctcgtcttttcatttcttgttgcgtttttgtttcctatgacctgtcttgagaatatttgtccccccccccccccccccccccccccccccccctccccgccccccgcccannnnnnnnnnnnnnnnnnnnnnnnnnnnnnnnnnnnnnnnnnnnnnnnnnnnnnnnnnnnnnnnnnnnnnnnnnnnnnnnnnnnnnnnnnnnnnnnnnnnnnnnnnnnnnnnnnnnnnnnnnnnnnnnnnnnnnnnnnnnnnnnnnnnnnnnnnnttgttagaatttttgcccccccccccccccccaattcgggctgataactaggcggccggtctcaatcaacctacgacgtctgccttttaagtgtccgatatattaatttgcgaagatcttacacgtttccaaagcgctgttatggctttttctgtatttgacgacttttaaatcttcacaacatactgattctttctttctcaggttacattggcgagttcgaggaggtcgatgaccaccgctctggcaagattgtcatccagctcaacggccggtacgtttcacgattacatccaccagtctccatggaacatcaagctaatgttatatctccagtctcaacaagtgtggtgttatcaacccccgctaccccgttcagctccgtgacctcgagaagtgggctacccagcttcttccttcccgtcaattcggttacgttgtcctgaccacctccgccggtatcatggaccacgaggaggctcgccgcaagcacgttgctggcaagctccttggcttcttctactagatggagtcgttctaaaaaagaattgagaaaaagttcttgctttgactggtttcgcatggcgttggttttattgggctggaccctggaatgtaatctggaatttgtagctgtgaacaaaataccccatgttccgcactttcgatggtttgcatagtacacggttcgctcgtatcaatgctagatgattctggtctgcaattttgtacttctttttcctgattttatcgtagcctggctcggaccgaggtgtactttcaccgccctcgtgtaagtgtattctgcctttcccccgcaacaacaatatcagtactgtacatagttgaacaacccaagaattctttcgccatgcctttggacacgatatatctgacccgtcatggagtatgtctgcatacaatcatcactgcgggcttatagacctaactatggcagcaccgcctcagctggaccattgacttccgtacaggcacatacagggcccaattccccacgccgacaggaaacccagcagaccctgcattgacctcacacggcgtgcgccagtcacacgagctggcggaacatatttctgcaccccaattccacccgaaaccattccgtatctactcgagtcccttctaccgctgccttcaaacaatccagccttctgttgaagagctgaagagaatatcagccgagtctggaaggagccagcaagatggcgagattgggtcaattgatcggcatgcggagcttgacgtacgaattgagaatgggttagggtaagtaatatacctataccttctttatacttatacttccatccaatcactcaactatttccctctcgtccgaacaaaagaagcactttaccagcacattgctatccaggaagctaataagaattcagagaatggttcggcgcaacagatttcttcgaccacccgtcccacccaacctccgagataatgtccacccacttcccaaccctcattccagaagctagtcaaacctacataccactactcatcccttcaagacgtggcgagacaatcaaacagctccacaaccgcctagcaacagccctagaaggtataatcgccgacatcgacgcagaagtctccgctgtggaagcagagctgccaccaaaccaaagaaccagcaaggccgtcctgatctgcgcgcatgccgcgccgctcattgccatgggccgggttcttacgggtcgcatgccggatgatagctctgaagaggactttaatgtcttcacagctggtttaagtacctttaaaaggaggggggcttcttctactgctagtgctggacacggcggtgataaggaagaaagttcgagtgagaagccgcttgccgagggcacgacgttcattcgtgcgtcggtatccccgccgcagtggagaaatgggcgtggtgttggtggaggatgggattgtgttgctaatggggattgtagctttttgagtaatggtgctgaacgtggatggtgagtcgatttcttccttcccttcctttggtattgagagacaatattaatagaccccggcaggcactttgatggcgaagaatcttttaatacgggtcctatggctctgccttccgatctacctgtgaatgtaggtgccacgaaactgtgagtgaaggatttgcgcaactatactgtgcccgtgggtttggcgaacataacgatgaggtcattgcatcttggatcatcaagtactataatatatatatgactccgaacaatgactacaaaccggcaatttgagctgtcatgatctatcactagtgtaagagaaatacatatcaaacttagagatgaaactaagacttcttgctaaccgcttacgactatttacgatgtacgatgtaagagcatctagctcaaaacgacatggacaactgacttgaaaaagaccaattctgactaccttacgtacttgatttcgtggctggcattcttgtgggtatcactttggccctcgtcgagttcaatcgcaaaaactacattgaagacgctatcgctaataaacgagaatataaaaagtacctccaggtatagatcagttcccttgttcagactgtgcatgcgtattcgagaccccctcatgttcagtacctgcactctccgcaccctctggcacaccaggttgagcccgttcctgttcctggccctcctgctcacgtacctgctcctgctcctgctcctgctcctgacgttcccgcgcctgacgctcctgttcagccaagaaagcttggtccgccgcagtgcgagcctggacatgccgctcaccaagaccgggaactagactcgcaaaaagaaaaacaagagctcgctccgcgcggcatatttggtcccaaatgctgaactccgcagcagcgttattggctccattctgggtggctcgatctgccgggccacctgcatgggtgaggccctcgagatgtcgttggatgggaccaataatcgtagtcgcaaactgccgcgggatactggtctcggaaaagaatgttaccaacagggcaatgctgacgaaaatgtaacgcctccaggtgccgggcgcgctggtgaggtagcagaagagccacagacgggtgaacagccagatgcggcggatatgtcgcgccagaccggcgtgctcgacgttgttgcctcggcgctgctggttgagcattgcttggcggatggcattctggaccactgctgcgttttgattgggtgcttgaggtgcctggggtgcgttgggtacttgaggcgcgccggtttggttagcaggggctgtattgggcgagcccgcctgctgcgttctggggcgggctacacagtttggtctcacgagaaggttttctcccgttggcgaggtcagcatgaagagctgagtggagtttggcgcgagggtgttcaagacatttgtttgggtagcaataggggcctgggctagaatgcttgcctgcgaatgctgttgctgcatatattccattatacgggcgcgttgttgaacatcaagaatacgggcaagtagttctgcaacaccgggcagaggaagctgtgtcgcaggccgtgcatcttggattccaagaatctggttccgtatatgaatgatactctccatggatggcatgagacgtcggtccaattgtccctcaatctcctcgatgtaacgtcgtaaagtgagaatacgctgagatgattctgtactatcagcttctggtgcgtttgtagttgctgagtgtcggttaggcaaagaggtattgacgtattgattgattatcatgtgcggagaagctgaagcggcaccgattgttctaggaatgctagagtatgaggacacactggctgcaggcaccgaagtatcgggattggagtgatccaaccatgtggaggaggaaccggaatcttgggcagaatttccgaaaggcgaatcttgcggcatctcagagacaataggtacttctgtgtgtgctggttcaggtggtaggacgaggtgcatactatcagtgccttcctgcaaaataaataccgttcagttaggataggccatatggcgcgggttagaaacgagttacttacctcgatagatgagaccactaccccgagtgttgcgtcatcgacagttagaggcttccctcggtagatgagcctctggtgtgatacttgagggttgttcggaaaagactgttcgatccggctcttgagctgtccgactgtggaggagagtggaacgttctcgagtgtgaaccggcttggagggggtagagactggcagagtatgtgaagcgtgattgttctgggtgtttctccctctactataggctgggatggtagtcctgtcgccattgcttcagatctgtggttgttcgcaagctaaaaaaagccaatataaagcggatctagttgctgatatctggcatcaattgatagtccacgggtgttttctgcgagactctatagcagataggaaggacgtgggaagaacgatgcaagatgataaagatgcaaagatcaagttgcaggaacgctcatttatactgaaatgtatttggatatacagagcagagagaaagacagtctgttgcatttccacgtgcgattctgccgggcggtcaaccggtaacaacatgttttccccatttcggaaaaaagcacgctctgggcttaggggtcgattttagcgctccaggccgatggattaaaagttatggccaagcgcctctttacttcttcacctctccttcattgcccttccgctggccctcggatcggggctgcgtcgatggaggttctttcatttcgggctacggcccgccataaagccagcctccgacatttttcgtctaaatcatggagacaataccagaaggataataactccgaaaacaatagaggaggatttggttcaaggctagggtttgctctgcgcaataccaaggtcgaatggtatcccatcccagtcggactcggaatcggtttactagggttgctgtcgttctacaagtcacaacgtgcggagcgggatcggttggctcgtgatgcagccggcgatgaatgggaagaaggaaaacggccacctcgtcgtccgaggatcagtctgtcaggaccatggcatattcagatcatgtccactctgcccctgaaggctatgtcgcgtctatggggtcggttcaacgaaatcgaacttccttactacctccgcgttcctggattcaagctttactcctgggcctttggcgtcaaccttgatgaggtcgccgaacccgacctgcacacctacccgaatctggcggcattcttctaccgtaagctgaagcctggcgttcgaccattggaccccgaccctcgtgcactcctggcgccctccgacggccgaatcttacaatttggaatgatcgaacggggcgaggttgaacaagtcaagggaatgacatacagcctggatgcccttctaggagcagccacgcctgcgaacgccgaccacagcaaccgactcacggaccaggacctgaacgaagaccaaaaggatgttgagaacatggatgcgcatgaggagtttgcgcgcatgaatgggatttcctacactctcccgagtttcctttcgggagactctgatgctcccaaaggacgtgcttcattggatgcttcaaccgcatccaaagcaacctcggaaatgcttgtgcaagaggacctggccctcggcgatggaataccatggtacgcgcccaaagcagcagccaaccatgccttgttctacgttgtgatctacctagcacccggtgactaccaccgtttccactcccccgctccctgggtggtcgagagccgccgccactttgctggcgagttgtactcggtttcgccctatctgcagaagcacctacccggtctattcactctcaacgagcgagttgcactcctcggccgatggcgctggggattcttcagttacactccggtcggagctactaatgtaggctccataaaaatcaactttgactcggagctgcgcacaaacagcctgttgactgataccgctgcagacttggcagcagccctggctgccaagcgcggtgagcaatatcccggcttcgtggaggcgacttatcgccacgccagccgcacacttaacggacatccactgcaacgtggagaggagatgggcgggttccaactcggcagttctattgtacttgtgtttgaagctccgcttggaactcacaagtccactgatgccggccggccggaaggtgcccccagtgatgggtggacctggagtattgagaagggccaacgcatcaagataggcgagaaattgggctttgtcggtgaggcgtaacgtacatgatgttgcacagcccggtgcacagccgacagcagtaggttattgcctcttgacctacatgtttgtctgtcttgtattataccagtccttctctctatgttaggatcttgatcatttagtttaatcacattttttcccccttcgatctatgtcagctcaagtgtatcagcgtgcatatttcctaatgtatcagcacaggccaggtcgtggcgtgatggtcccaaatgcgtcattgccgatcccaggctctagcgtgttgcacaagtaagaaactatgtaggctatgtagtaatgttgagggtaaagctcgggatgcgatcggcttcttgagcattcgactcgattgaaacttatgctaagtttcttaactagtatgccatgccattgatagtcttctcgggtttctagatagacggcggaaaaaggctcaacttgtgtagacgacttctctttgtataactttcgactattatatagttactgtaaggttattactagcagttaagttaggagaacgtgcattgagcgtggttgggttggaggaggatcattggtgcttctgtcgacaacactgcggccccttgctgtggcatagtggtccatcgggcccattgcatcttaggatctagaagcaatctttgcacccacgccctttttaacgtggtgatggacatttttattcgtggccttgaccttctcggccttgtcgatcgcacctagacacgttctgccaaatcttgcaatacatacatactagcatcggggatgtcaatacgaaatccgtctccttatcctggtatatccaataggatattcacggaatgctagcgccgtatctccctctcttaaaaaaaactctttaagccactcgaggtggagattgagttgactagcgaatactctattagagatataagagaaaagtgagagtgagagaagaattacaacagaaaatcgataaaaaaaagaagagatatgctctcatttcactcttcattctcactttcacttgaggtgagaaaattcacgtcgctttgcctttctattgtctggtttcggggggttgacgttgattggttgtgcatcagaatatggagacggctatcccgtgtgcgttgagttgtccatccatcgagcactggcttcggtggtcgccccctcaatcagggcgagggctccgacccaaagtcacagagcgatgctcctgggagatcaaagcctccgattgaagtgtgctgccttttggtcggaggttctcctaagcttgggcgaagggggaaattcaccactacctgagcttggattatcatgtgccagcatgtttgcaatttcttgccagccgaacacatctggggcaatctcatctctcattgccgcttaagcttcgtggcacgagatgagccccacgactaacaattagtcgagttccagcatagtttaaacgccattccaccatgacaaaaccagatgcctgctaatatatatgcatgaaactaacccatgttataaacggaaaggccgatctgtgagatccagcgcttgaacatgactcttccgagtggcgtcgtcagtccatctgccgccatttcggcagtagggatcttcatgaacttcaccgagccctctaagcccgtgaaaacggattgcaatgtttcgtatttgcatggaactcagggtttgaagcaagcgcaattgctcattgttgtcggcgtaaattggagttggtttcaccaggaagctgtcgataccaatttcagaaagtagctgtgatagccagattgcttcctgaactgctagtacttctgcgatgtattcactttctgtagtagacaacgctacacagggttgctttttcgatgtccacaagattagaccaacctccattttgaacgcaactcaagaaaatgatacttggccacatgtctcttaaaactggaggcgttaaagccctgccccagagccttcttgtctctctgctgtttaaccgtagcattttcaaggaccaatttccctcaaagtcaaggaagttaaggcgaaactccgagccatcactgaggtatccccaaatggaccaatttgactggccacgggccttttgaaatgatcttcaacaccgtcagtggtatggcatgccatgggctcaacaagaacctcatttctgctttttggcatctttgaatccatatgttcccctggagaaggagggtgttgagtatagattcgggcgttggataacgaatatggaccatataacgggagtttcgaagatcaactctgttcaaaacggaatctagacactacttttgatcagtacctgctttctatcaacccgaagaggacagtgtaatcggcggttccaatgcatgtgtactgaactccataaatggagtctcaggtgagagagtggctctgctgtgtccggtgcttggaagtatggaaggagttagcccaaaaaggactagttgactaagccgaagtttatttcaaggtttcctcccttggtgacgtatgctgtgcgcacgtgataatgcaatgactcagctttggcaaaaaggcccggagcttggatcgtccattttcggctgattgactgtcaatcagtgttgtggcgtagtcaagtaatagaatccaagaaccttggaatagctgagtttcagctgcaagtatttttgccattaatatctcatacgtcgcttaatccaatgaacacagggaagagataagaccagaactatcaacgtaggaccgccaagcttccatatctaaatcaacaattccaaccttctctccttctaactttttcacctgttcctgttcccatccacaatcttttcttgactgatggccatctttaactcgcctcgatcatttcagaatgtcaatgctattgcccaggccccaatgggcatggaccgcttcttcataggcgctcatgaaagccatcccccattctttcacctagtgctactcgtcttttcagcagtactggaagtcgtctgtgtcagcttccctggttatattgccgcccgtcagggcatatttgatgccgaagctcagaagctggtggcaaacctcaatgtcgttctgttcaccccctgccttagtatggattcttgctttcgccacatatttctatgacatagctgattgtggtcaacagtttttaccaaattgggctcacaattaaccgctgaaaagcttacggacttggctatcattccggtcatttttattgtccagactttcgtctcatacttctgttccttcattgtcgcaaaatgttgccgcttcaagaagcgacagtcaaatttcgtggctgccatggcggtacctaatgggcccttccattgagacagtcgaatatcttgttctaacgataccttctcgcaggtatttggcaattcaaactctcttcccatctcgctcgtcatatcgctctcgcagaccctcaaaggcctccactgggaccagctccccaacgacaacgatgacgaagtcgccgcacgcggtattctatacctgcttatcttccagcagcttggtcaactcgtacgctggagctggggataccacattctcttagcgcctaagcaccgatacctcgaggaggtggaacgcgacgagactggtcagtcaattatcgagcagggtcaggcgctgtatagcgacaacccggaccaaaccgatccggacgaaccgctagtcagaacacggagctcggaggatctacaccatgttcacgacgcgacaaacaccgaccgtccgttcccatccggcgaccaaacacccgtgtcaacgcgaacttattcctactcgaagatgtcccccgccccctcagacgacctggactcagacgacacaccgtcagtaattggaccaccacccaccggccccttcctcccccgccaaagctctcaaggtgacattctccacttcccggatgtcgaagtcaccgcgcgcgaagttcaagaagccgagaaaacgtgtttccagcgctgcaaagcatctctgcgtaaatctggacaacgcttgagccagtggcgagaaaagaaagctactgccctccacgcaagcctcccaccaaacgtccaaaagggcatcgcagcaaccactcgcggagcgcgccgcttcctcaatggcttatgggatttcatgaacccaccgctgtgggcaatgctagtatcaatcatcattgcctccgtcccaacgcttcagcgcctcttctttgacgacggcaccttccttcgtaactcagtcacccgggcaattgagcagaatggacaggttgccgtgccgctgatcctggtcgtgcttggcgcgaacctcgcgcgcaatacaatccccgaagaagcgctggcggacgtggaacatccccgcgacgaacgcaagcttatcatcgcttcacttgttgcgcgcatgcttcttccgactctgatcatggctccaattttggcactcatggctaagtttgtgccgatcagtattctcgacgatccgattttcattatcgtctgcttcctactgacgggtgcgccgtcagcattgcagttggcgcagatctgtcagatcaataatgtttatgttggcgctatgtctaaactcttgttccagagctatgttgtctggtatgttcttatccctcctatctatagacagacaccgtctggttgtcaatctcaattgatcattgctaacatggcttttcttccaggatcctcccctcgaccctcgtacttgtcatgtgcgctctggaggtcgtcgagtgggccgccgcttcatagactcttgtttgacgtctgaaccggaacggtgaagctggtctttccttctctagtccttttttcggggtttatattcattctctgtggacattcttataaccccattcctttttctcttttggggaattggcgttacctaaggcattattcctggcacacaaactgtacttatgaattccagtactttgaccttgctataactaacgtaatcggtaagcgaggcggccatgtaagcacgtcggccacgcaacccaacccattaatttcaaatacatttatctcaactgaaacgcccattgcttccatctgttcctaactcaacgatcctcataccatttccttggggatatatatctacccaaacagtctacacgcccaagtctgcccttattgatagcatgcgtgaaatcattatcgagtctgactgagaatatcatgaaagccctcactagctgggttcccatcagagacaccgaaaggttcatgcgtgtcgctaaagcggaatggaaagtccatcgtcgcaggaaatccccttttattctttctcgagttaaggcttcgctcgcgcgtttgtcttcgaccttatttggctattttcttcacggccaaccccactttgcactaattcgccctatgggtgtgtataccctaatgattgcaatcgaagcctagtcgtcatgcaccttgaccacgaccttgccacgcgcacgctttgtagcgatgcgctcgtaggcacctatggcatcctccatgtcgaagacagagtccacagggatacgcaagcggccctcctcgatcagacgtgctaagtagactgcatcgtcacatgtcggaggcgtgctgaacgttatatagcgacgcggcacgccgcctagccaggtgggcagccaggtgttaagcaaggcattgcgcgccatcgcatacatgccctcgaacgcgccgatatttacaacagctccctcgggctttagataagccggggagccgacaaaaagtgcttgcgtgccaacgcaatcaagcagaaagtcaaacggcttgtcgccatactgctgcgctaggtaggctggcagagattcatgctcgcggtagtcgacgaactatttgtatgttagtcacgactcatttttttatgcaacgttggataactgtgcctacctcatctgcacccagaccacgaaccatgggctcgttacctccgctagccacgccgaccaccttcgcaccacgcaccttgcacagctgcacaagcaccgaaccgactgacccgctagctccgttcacaagtaccgtgtgaccctcgcggacacccgctgtgcgaatcatcttgagcgcggtgctaccggccccgataatacccgaggccgatgccatgccaataccgccatcgatctgtgcgacctggctgccaggcagtcgcacatactctgccagcacgccgtggcccatgatcacagcgctgggaatgttctgaaaggcaatgacgtgtgagcccggatcgcgcatatctgtcggtgcacccccgccagccgctactaccacgccggaaaactcaatctccgggatccacggactggtgaaaggcagtataggcagtatcttcattatcgcctcactgctgaactgtagggacacgtgtgacacgcgaattagtacatcgggcgacgagcctgtgggcacttcgggggttggatagtcagtgaccagctcgagcgcgtcactagcaggaccgcgtcgccggcgtacccaggcacgcatggttggcgggacggtcgggagctgggtcgacgacattccttctgccattggtgcgtaggaatagatggagaagaggatgattatgatagaagcagacagaaatgctgtcgacagatccgaaagccgctgtgagaaggattgggcaattcaaggagaacaagtgactgtcgagcctctttgaggtagactgatggcacagcccgagaatgtgagaaaggtaggggttcctggaggttcgccgtacgcgtcataataaatgattggtaagaaaaagcgtgtaactaagccttaactaggtgtatcgcaatgactttgtctaatgccaccccgtttactccgtagtcaaggacttccaatgttgacggtatacgcctaggaaggccttcgatatgtgcgcttatcagaaagaaagaaagaatccatcagtcttagtttagggaatataaattccttcagtttatctccagggcaagagtgtaggtgtccatcctaagaacaaagaagtgggcgtgctcaggtgtactcaagcaaaaagcggcaaggcatgagcactaatgcggaaagagggagctatacacctgtaggtataacgtttgataaatcaatagttctagttggtttaatatcatgtcactctgctctagaactgtagcttcaatagcaagcaaataccaaggcaacagtaagaaagtcagtgaccggattattgcacattcttaaaacaacgttcaatgatgtggtcagctccgacacagaaagaccagtctaagaagtgaccggatgctggtgcaaaatggaagaacccaatcacatttccatccttaacccagattgcagatccgcaaacactatcttggagactttcggtggacccttgacccatatagcaccagcgagtcttgatccattcgaatgaaggttggctagggtcagtacagggaatttgctcacgggtgtgaggcccacagataccttcagaataaccaataagatggttattcatatagaccgtatcaccaggcttcaagctgtcagcagtgacgagacttcgtaactgggtaggttatattccgttaaaagggctctcgaaagtgtcatttacatacgggacatcatcatgcaattttgctatcgcgatttctgtatgtgtgatcttcataatgatttgaccgatctctttaccgctagcacatggatggaaaacttcgccgccatgtggaaacccatgggaagcaacagtggtataccgctcgccggagttagagttctcaacaagtacaccagaagtagtaagatacccaggttcggtgggagaatatatactagagttcaacataacgccgggacgcagtatatcatacttgctactatcaacaatatcggcagtcggttctgtgagcctgccttgtgtcggtcgtcgtacctccttatcaaacagataaaaacaggtacagcagcctatcgaacggggtacttcagtaaaatcagtatcctcatcctccagtacaatcataaacaaattgccccagtactggacttgggtaatagagatttgagcttccataaagaaatcgaagacgagcttgaatgcattgtcaacttgagagggtggaaggtcggtgacgttgatttcagcgtctacaaaaagacgcgatttgctcgtacgtttcattgatggcattggaccctcatcattcgggtccgttgtgaaatatggccggactcaagcaatggttagcggccacggctttgggggcagagagcccagcaaaaacaccaagaaatagctatcagatagaatccgcttcgtgtcaggaaacagttgcataagctgagcagaatcgcggtggaaagttcgtttttcacgcaggttgaagggtagaatcacatgtctagatggtggaatcagcttccttagcatttcggtcgtcattttagaggaataggatcacaactgaagatgaggtgattatgtttgagagatgccgttggtcacgacaaagcccagctcctcgccgataaccaggttgactcgtgcgttcgggtcattaggtctagtgttgtctcaactggttgtccaacttggctccgatcgcctatcttttctcagctggcactccggcagacccagcaaaacgacagatgaaatctgcaatggtgagagataaagagtaaccttccgttctcaatggggtaatgtgagagcgacgtcaagtgctgaacaaagatccgctttttatagtaacagatcaggtaatctatactgttttacagtctagttttcaaatacgcttggcggtcaatgattccattagatcctaggagtttctacttatcagtataaaagactatgttgtacttcatcaataactgcttcaaaaactggtcctttggaatggcccttaaatgttcgcagctccgcgccggtctgggcaccccagaccgtgatggttatatttatattttgcttgacgagagctcatctcagtttctaaaggcttccatgatgctatggctacaactgcatatagcatgtcgaaccatccctcgacttctcttacattactctcacttatgaataccccaccttcgactccagacgccgttgactatataaaccaccagagaccctccccacattttcttcttcgccattcacccatctccactggagatttccttcatccatcttcccatattggatatggtgatctcagcaattccacgagaacaagaaccaacaagtgagcggaagcctgactgagagaactagacaagccaactttggcgatgtctcttcttcagcaaccgcaacggacgagagagtctacgcatctagcggaatgacaattgcaaacgatgacagcgatgaagaaagaagatttgctggattagcgactccctctcaaacgaaccaacacgtcgacttcgcatactggaggataggatatgcggactatactggttgggcgtgggcttgaccttttgctggtcgggcataggctcaacgtgttgttcgtcaggtacagactcaaggtattgggtgcccggaaggcggacaccgatgtgggtccagatcagtagataattccgctcccctcctcttctctcttttctcctctcgtgcacttcatcttagtcgaatcgatactggttgttttgctcatagcagacacaacgtagatagatcgccattacaaggtgctgctcatcaggcacggattcaacatcctccttgttaggcacggacttagcgtcctcccctcggctactgcttattggcaagcgcttgagtcatgccacaagacttccctgatgcgcgcattggaaagattgatcaaagatttacatgtcttcctatccgcatctagggttggcctcccggaatacttgactggacgtatttgcggcggaaagagctgttggtgcaaatatgccatgacgaacctgagtccagggttatggatatagcccatgtatatccagtagctggtagctacaaaacgccaatgtctgtcccatgtctgttccctcccctcgccgtattgcgcgaggttgagtctgtgtatgacgagcaggacgttgagtctatgcctgacaagccatagagatatcattctaccaatccaaaggccgaaagagcaactgcgaatacgaacccgtcaacaaattcaatacttttgctattttaggtatagtttaagtcaactgtaattgatgatgtttccccatgattcatgattacatacagcactgctagaacaagcttctaacaaagatcacggtgaaggctgaaaggtattcaagttgtagcaacgcttggctagaaagaaatgagatcgacggaagagcagcggttcctttcgcaacagttccaggttgattgaatccagaatcattactaaaaggctagtttaggattgacctagagttctaaggcacaccgcatcccgttaagcgtcgaaccgggtcatttaatgtaccgtggaccatgctgcagcttttagtgcagaagcggaacccgtagacatgaaacgaacttcatgaagaaacgttcatattgcagacaacgggaatgcggatatatcgtatagaagtctttataagtagtggcactttgcgcctaggactcagattggttcgagtaccgatcgaccaattttgtaggggtgttgttgatcttccatggggcttccccaggttctctctctggtcgtatttgcataagggaatacctgcaaatccacgtcagcagagtcaatatgagcagattctccctcaaacttactccgcgaaaaatgtaaacgtctacatcatcatttccgatcgtcctggccgcccgagattggccctcttcaccgatgaaccgaggaatctgctaacccgcagaatcttcctcgaggaccgtatcaactcaggaattcatttccatctttgctagtcggcacgttctgaaccacgggaccgagacgtcctcatgccactcccgagtgaatggtcaatttgaatgcaagactcttgctgcgcaggaatgtgtaaaatccaatcgaacatccaaaacagatgagcaactagggtctggagtgtatgtgttcacaaggctaatcccaagccaaagctaatcaactcctctcaaacaggacatgattctccgctgctagcgtgcgcagccaatcccgccggatcgccctgcacatcaatgaacatggccataccagtcatcgaatgccaaagcatatggcaatgcaaaagccaaacgccggggttatctgcccggaaacggagaacagcatagcctcgactagggatcacgactgtgtcacgcaatgcagcccgcgatgtgtcgtatagagcggaatcataattaatgttagggtcccggacgtcatccgtgtcatttttcaacgcatccgagtcgggttcttggtgtggtgggattttgtcgacgaagggattgtaggagccccagccaaattcggattggtagactgcgagtacgtagaagtggtgcccgtgcttagtggaaattagtgaattgtcgtcactggataagggagggaagggttcgtaccatgtggaaggggtgggatccttcatctaaattgttgattaccaggtctacccatataggttccggccccgtggttattgagaattgatttgcgtcccatttggctcgtggcatagacgccagtggaatgggtggatcttgctggggcttccaggtggtttggttgaagtaaccaaatggcttgttggaatatcgggccattttctggatcttggtgtacaccacgtgcgtttgttgagcggcgggcgggatggaatggagaacggagggcgcagaaggtacttctgcgatgtcgagacggtgggccttgattggaggcccctggacggcatcgggacggtagttgatggggaaagtttgatctggcgtcaatgctgggttggcgtacttgaaggaactggtgaaacattagcaactagtaactgctatgctcggcgagtttgtcatactcttcatctaactgaactgtcatgtgtgactgcttttcagatgtttgtgataatggccgaaggacaaagtctatgcgttgcccgggaaagagtgtaccgatggaatttatatgcttctgtttggagcgggccacatcgatgctatccacttgaagcaggtccagaagatggttgtcgaaaacgagattcagcccggctagagatctgtcaactagttagcgaataactaatttggctttgatgtcctgtgacatacccagtgttgaccacgcgaattcggtatgtcgcatgaggatcgaggtcgatgaatgcattattcatctgctgatcaatgcagtccaccggtctagcaggcaccgccatcatgcagttaaaataccctgccccattgatgagcatggaatcaggaacaggctaataccattgtcagatagacttctccaccatttgggaccatatcggaacttacctcgcttccaaaattcccagggtccatataccattctagaacatcacgcgcaggacgatggtaccagtccccgatgagaagcaaaagttctctatcataattgtaacggtgcagaccactgcgcccacgggatgctaagccccgaacggtggatttggaggctggtgcatgcacgaccagcccaccataaaggccatccgcccgcgagacccctgaatgggcatgataccagaaagtaccactctgatcggatggaattgtcaaattatacacaaagctacttccagaagtcacggggcattgggtaaccccggctgcaccatccatggcatctatgtgagttagcgccgatgcttccaaggtttaaatcgcgaaagacaaagcttactagccacatgaagaccatgccagtgaatcgcaatcaactcatccggcaaggcattggtaacagtgatgatcaatgtgtcaccagagcgggcctctatcgtcggtccagggaataggtctagtttgatatcctccggtcagatccaccacggtgataccaggttctgctactccgtactgaccgttgattaaatagacccgcttcaatacaccgtctggtcggcgcaagcccgaggtcacatgccaatccaagtattgagtctccggcgcccgatacgcatgatcctccgggtgaagctctatgcgcggtcgagcagtgaaagcctcatcttgaatgttttgaaggtggccgggtaaaatcaaaggcacaagaaagatgggcgattgcaaaaagtataccaagccgatcaagaaacacgcaaccaatgagcagcctgcgatcggccatggccgctgcgatggctccggcattggttgggccaatttctctggactaggggctgttttcccagccggactgtactgtttctgcattgtttgtaaagaactgggagtatcgcccaaattaccgttatatagttagaaagaaggtcaagtacggaggggaaagaacatcccgctaggacctcaggccacccttactgccggggatcaacgtgatgcgaccttacagcgagacctgcaagacacgtgcccggctggatcaatcacagcgaagggaaaataattaattgaaaagtaatttcctagggcatcgacgccataaataagggaataagacatgtactaaagggtgggtggcaccctggactaggcccaaagggtacaagatcgttcctgccgaaagtgtgttttgggttagcgttgggtcgaaccatggaacagcattcacgtggagacagctgcatatcagattggatcagcaaggcacatgtaccttttcgtccatcactcgactaacaacatgttgtatacgcatatgagtgtattattgtttatgcatgatcggcatgcttcactcaaatgccagcccatccctgtattcaaattcctcaattccgattcgttccttcctcgaacggtctgccatgaagaaaccgcgatgtaaccaaagcgtgtgggggcatcaatatgtacatacactatacacatgaaacggtacttcgcgaatctctccgctatctgcagcgtcgggggcacataagtagcgcactcttctcgcaggttaactcttccccttcattccttctgcaattaccgcatcatggctttcaaattgccggcgtctatcgcggtcgcgatagccctgggaacgggactcgtgtctggtggatctctaaaagacattgaacatgtcgtcatcttcatgcaggagaatcgctcgtgggacacggcacgttttgcctgcactatgaaacattgacatcgtgctcaccaaatcgcagtatttcggcactatgcctggagtccggggattcaatgatcccaatgtccaggtcaacccagacggaaactcggtctggaatcagtaagtgccgcctctaagggagaagttagttctaacattcctggtcagattagtcgagccggcccaatcaaacaagaccaagaccttgctaccctggtatcttggatatcaaggcggcgactggaatgatgcaattcagtgcatgtctgcgggtagcaacagctacgaggagaaccagcaatctctcaactatgggttgaacaatcactgggtgacaaacaacacaccctggagctgggggtatttgaagcggcaagatattccagttcaatttgctattgctgaaggttggacatcgggagatatgtatcaggtgcgtggcaagactcgttttcagaaattggtgactaatttacaagcaggaaagccaaatcactgccacaaatcctaatcgggttactttggtcagcggctccatcaacgttcctggtagtccccagagcaaggaccagggaggtgtttatattgacaataatgaggtaccaggtatgtatcgtcggctctctcttctgttaatatttttgatctaaccaaattataggctgtgatgacaacggtatcaactgctacccactcaagtggaagacagtctatgacttttatgaagaggcgggagtctcttggcaactctaccaagacacaaacaactttgacgacaaccctctggcttggttcgaccaatttcaaactgccccgcaaaacagttctctggctaaaaagggtatgtcgttcgtgggccttgattccttctaccaagctgccgccaacggcacattacccgaggttagtttcattgtcgggccggcggagctgtcagagcacccgccgtacatgccaaaggacggaggctggcttcagaagaaggtcgtcgatgccgtcaccagtagcccgaagtacaactcgacccttctgatgatcagctatgatgagactggtggctttggcgaccatgtcacccccttccattctcctaaggataccccgggagaatggatgcaggaccccttgggtatgttcacggatatcttcacaggacctggtttccgggtaccattctatatgatctccccctggactcgcggaaaccgtgtgttcaccgagcgggcagatcacaactcccagattctcttcgttgaggaatggttgactgcacggggatacgaaaatatcacaaccgatcagatggttgaatggagacgcaagcacatgtctaatctagtcaacgcgcttgatttgcacaatccagactactctctccccagtctccctgatgccgggaccgtggataccaacgccaagggcgagtataccggtacatctaactgccaggcacgttacaagcagacacgtccggatgttccctatggagaacagagcaacgcaacggatgtcaataccctgtggtttgaagaaggtttcaaagaggtggttggctacctcaccgagggccgatacctaacctttgagaagaatggagcagccctcacgaatccggccagaggcaacagccttgtgtccagccctgcaagccctcagcacaacaataaagcgcagcgttgggtgatccactacaacaatgacgaggaaagccagacatttaccgtctccagcgcactggatggtcgatgggtcggccccgatggtgttctgcttcccaaaagccacagcgcaaaggcagcccaagtgcatttcaccttcctaggtggtggccttggctataccatgcagtttgtggagaaggggcaatacatcgatattgacaagcacggacacttggatactgaaacccgcaagactagacctgctagtggctaccaggtcttcagcgtctctttccgtaattagatgattgtgatgtgatgacgatacggaatcttgcatgtgcatcccgagctgggaacgaaattatttatagtatcttctcatcaggcaaaagcctgaaacccaactaaatatacatattttccaataatctcctgtccacaccgcctctccaatcaagttctaaaccgagccgaagtattccataatctatgcagagataaccgtgaaaggcccagcagcgttgaacaaggtaggcatctgtataaaatcaattagcccctggagataaaccaaaaaaaaaagcaaaaaaagaaagaaaacatacctgcggcgcagtcggaagcgaagtcccaattctcaagtaccaaagcgaggcatcctcgacggcgggcaagttcttgggaatagtaacatccacagcaccggcagtctcattaataccgctcgcgatccggatagactggttgaaggagatggtgtcgaggtggcgcacggggttattgtacagccagacattgtaggcgtcgccggggtactgagtcaacgggtccgggcagcggccggtgggcttgcggttgaagcggacgcgcacggtttggccggcggtgacggttgagttgtcggggatgccttggtagacgtttacgcaggcgtagtcgcgtttaccccaggctattgttgaggaattgttagtttaaacgttgagtatagagtcggaattgggattggaggtgcatacgctggtccttggtgaacaaggcggtgctggttcccgccagggcagcgacgattgcggcagtgaacttcatcttgggatttgagttggtggtttggtgattgatggtagaagagagagaattgtatggaaatatattcaaggtgagtcctgagaatcggcacttatataggaaataaatattttgcctgcaatatcgtgccaccgacgacataatacctgctaattatggattcgggttcggaaagccctgtctgcgaggtctgagtgatcatgtttcactcagtctctccacatcgactcgaattagaatcccgactgcttggcgtgaggagtgatcggcgtagccgatctccgtccggggaggagagtcgcaaaagtctcgtatatggtaccgagtatagtggcgtgcagttctgtgttgagcctctttcatgaatatactaggatgttggtttatttgcctaagggatgttcgttctctgcaattgtcccttgctttgtggtcacgagacaacatctgtctacagattttcagaatacattaactactagttattgagtgtttaatccacaccgtctatacggagtagctctttagatgtctcagggaaaaaagcccctataatgacgatgcggataatagtcgcctaacagccttgactattggtttgccttttcagcccaacgggtctgtttctccgcttgaatgacatctgacatctgggcagtagcccttggctgcagtaaatgtctcagaagatgcccagctgtcgctcttcataagaattatggatattgccaaagagcgcgttctgctaaatatgaggtagttaacggactatcgctcttactgcctgccgcttgctcctaggaatacgacttcagctctagcggtagacatccacaaaaatattctagacccatcgatcatgcctactggatgatctagcagcccataataaaatttgcaacccctcatttgcctaccatattctaactagcaatcagaaaatacctcattctagctaaagtctgataggacttcctaggagttctcagacatttcgtgccaccacaatgtgattggtgagatgatatagatcctaggagcttaagtgctggtacccactcgcaagagctatgagtgctaacgttgagagtcaaggtatataaaaaaacaaagagggaacccggttagtggttctaggatgcagttgataggattgtcgaaaaatcccaggccacagaggccaaagataagaccagcgaagatctcaagataggatcgtgttagtgatcccagccagcaggcgttgcttgcctgatccggacttgatgatgatgctattcccagatgacctaggagcagcgagatcgatgaaaattgatggaaattgatggagaaaccacagtaatgatgaaactgtgggtggtggcgatgatggatgatcttgaagatgcagatccaaagagaagaagaaaaggtgcagagtggaagcaaactccgcgggttagctattattaggaaatagcaaacaaccacaaaatcgtctgattatggtttaccccccagggtggtatcgcctggcagaaaaatctctgcggcaccttgacagatcgtcgagaagtgatctgaaactattcgcacatcccaaaggggaaattctcgagacttggcgagaagcgaattttccgaggatattgatagatcgtgagatcagaccaataacgaactccccgggctcataacctattaagatctacgagttagtagatgaagctacaatgtgtgttgtatgaagaagtgatggaggaaagggagagaactagtctaccccatggaagcatgtggaagcatgtgacaatgtgccgcgtgagagagttcaacaggcacgcgacactgggcccggatcggatgaggttccatggctcttacaataaggattgctagaaaaggcatagtagttttgattactatggttcgtcctaccctgtcctacctctatcaagtcccaggtctgaatttcttctttcctttctttccttttcacaaacatctctgcctttaacttactctcactcatctttcacctttactcatttctcaattctctagttatttacctctctattatctcaagtttgagccaatctgaggcaaggggacttcttactttttttcactttatactcaaatcgatttctacacatcctctattcggcactcggttaagtcacttgactatggaatcttctcagtctaaccctcctacctcgcccgactctgcaacttcacccggatccccaaaagctccatcgaaaattccaagaaggatcagctccaaaaggattgctcttcccgatttaaaatctgcactggaaagggcggttaaggccagagggaaaacatactcccaaatcacggtcttcgtttgttattgggacgacgacaacacttgtgctcaagaagatggagaaaccttttcccatatgatggctgatcttttcggagttaccagccaaacatttgtcataaaccacgaagatcccgttccaggctgggatttaggagatcgcctgtatcaagaagttgtgtccaaacaccgcatttgcaaaccaacgctcttcatttttttttacgctggccacggtacgatcaatcaacttaacgaactttcttttaccgcgaccaagaaggaaaaatttgttccatggcgcaccatcgatcgtgaattgagttaccacacttatcctatggataccttctgcatcctagattgttgttattccggtactgctattgcgagtaacccgatgacaacccatgtcttagctgcttgtggctcttcggcgtttgcgagatcccgtgtaaatggaatatcctttacacagcgagttgcgtggaccatgcgaaagctttctcactctggcaagatatctatctcgacagatgaaatttttgatacggtacagaatgaaactcctcgtggctgctacatgccaagattttcgagtcataatggggtgaatcccattgtcttacctttccacgtcacgtctacttcaactcctccttcgccaggaatttcgtcttctggtcatacctcaagttcgagcctaggccctgcattacattcccgcccgctatcacaatttccatccggccgcgaaactcacgtccttgttctactcgttctcgaaggaaacccgaagctggttgtccaagactttgaaaaagttgttgaaaacctgccggccaagttcaaagtgaaaatcacagatgcctatgaaaccaatgcatctgcgggagtctttgtgcgcatgacttgggaggcatatgcacgattctcgtcaagcgtagaactagacgcactacttcctgtgatcggaccatcactgattcgcacacatgagctccgcgagatttcggtccgagctggccgagaaaacattccattcagagatcggccccaagacaaggcataaactcccaatgatttcccttttttttcctttccatgtttgtacttttaattttttaattcctagcgccgaattgaagccgcttattctcaaactataagacacaacgatcatcaaggcagtgttttgcctctttataaaaagtagattggccgggagttccagagttacctaggtaccccacactttcttatcaagtctgccccgagataggattgggactagggattagtaagcttttttcaagcctgagcgctcactgagcaatatgtttttacattactagttaagcatatcctaagtgctcacagtgatcacccgtgctgtgaagtactcggtgagtaggagccctcataaaagcggcggcacccctatcgggaaattcgcgaccgtggcctaaaatccggtacaggacatatgtattgcatatgaggcttcataaatttacaagtctgcattctgaccaatatagaacgctgttctattggattctatgttgcaattttcacccgcatcctcattccatccactggcttggaggtgatctccagtgtctgaacttgttagtaacgcatatcacttctcaaggcctagacctgcaggtccgctgagtacttacattgtacagctcggactcgacttcgtattgtccgttttctttttcaattggcgcacctgattcatccctcttggttgacccaagtcctactttctcccaattatatcgccgtgcggcacatgcgagaatcacaagtgcttcgatgttcgccagctcttgtccaatacagttgcggggaccacgctcaaaaggccgccaagcactggccggtatagagcctgtttccaaccagcgttggggaataaactcattgcttttgtcaccgtacacggcttggtcacgctgtataagcttctggcagttgtatagcatcaacccatccagacacttatcttcaccattcggtaatcgaacgctcaatccagtgtttggggtggaaaatcgcgctgtcgcagctggtggatacagacgaagaatttccttgataacggcagaggtgtaggtcattctttggagagcattctctccgtgttctaggatttggtttcgaacgtaagtcgggtgcgaatcagaaccgaatatctcgtccagttctacacaaacacggcgcgaggcatgcggggttcgagctagctcgtagaatgtccattgtaataagatgcttgttgtatcatggccggcaaatagaaaagtcttgagttgatcgcaagtccggtctaacacttcgggcgttaactcgtgcgtttcgactagactgagagcaaggacactgcgagacggattttgtgaagttgactgcccctcaaacttttctttgatacgctctttgatctgcacaccaagttggcgagaaagcaacttcctctggagagggagtaataatttccatccgctgtggccggaacgataggttgagcctagtttgcggaagagtcgaacgatctcactttggttctcttctccgagttgagcgtccagatcaatatccatggtgacggcgccgataatgtcaaatgtcaaattcgtacatagttcatccagtaagaactcctcgtcagtggtcgcataatgatcgagcttcgtcaagaaaagctgtgtcttgtccagaatacatggcagcagagtaacgaggtgcttatgggcaaatcccgggttgaactgtttgcgaaggcttttccactcttcgttctgactccaattagtatagtctagatgtacctcgaccttcaacctacttctgcaagaacaatcgacagtgggcccatcatgtcactataccagcgagatgtgtgtgactttggcggactgtatggaaacagcttggagcttttcgatatttgctctgcaacatcatgatcgcagatcacgcacatgggatggctcactggtcgcaaatcgacaacaaatagcgccggcttgccaagagaatcatacatagctttgagagtttcgtctatcaattacagtcagttttatgttcctttcctaaatgggttttaaccgaccgatgtggatgtttggtcgatttgtcttcatgagtttgtcgagcgtggacaaatgcccccatagtagcgatggcggaagctggggcaaccaggcatattgttccgttcggcaatatgtaatttttctccagagatagaaaagaagaagtggaaggatcgtagcgactaaagtccaggccattgttgacatgaccgaataatcgtgatggaagcccgggcaagatccactcgcttgcattattattgtgctaaatatgcacttggatgacaaagattatgaagactaactcaacttactacaagagtagtcaacctttgtccttgacgataaaggatttatctgcttccagatgatatcacagatgttatatattttcccctatgttatggtatcattgaagatgaaaaacagtgtaagccccacggacgacttgtataagcaggcacatgtgcgaagcactcatagattcattcccttagttcctatttgctcgcgatacaatcaattactatacccttgcacatgcacaggacaaagtaaggggcattttaggcatctatcctgccgtattaggattagtattgttgagggcagaacagatataagaagatgcttttgcgacatgtagttgttgagaccgtttttgcctcaggttgattttgctgagcgaagctcagcaaactattaggacctacactttaccttgtttgatcttccttcttctctcttatactcagcaagcacacaatacaacccacctaggcatggtttcatttcccatcaatgattctcatttatctaactcgagttctcatttccatctttagatttctacattcgaacacatcgaaaatacgtcatccctcggtgcaaacaccaaagcctggagcatggcgaccataggcagcctttccgacatacgaaatgagatcttggggaatgacactgcgaaacgaatcgtgttcaaagtgagaactaagcatctggattctcaagactatcgcgcctcagccaacggagttatcagcgcggtttttcctggctgggaagatgacccgcgggttctgcctgtcgctgttgatgtatggcatagccgcacctacattgtcgtcgacattaaccatcttgactacgacttcaacacggcccacaaaatcaaaaaggtcttcccagtctacatactccgtcatgggaaaaagcgtggttggattcttatcagatggcctcgagaggatgagccccttggtgacaaagtcatgtatcggtacaacgtccatggttgggatgccgaaacgcctctcctagaagaccaccactcaattatcatgcatgccaatccccgcaaccttgatgagcaaccgttataaatgatgtgaagggctaccgagctctctgagttcacatgctcactgctctactgaatttcttggaggccaaatcttggagaaggatgacgagttctgtttcgtctgagaactcccgctggaaataccttgaagataatgggagtcaatatctatttctttccatatcattgttgtcttgatataccaaattatgtagtgtaatgagagaatcccaacatcatgtagctacccggtttcgattccctgaaagcgggatatataacatcaactcagactagggccatagtacggatccttcagtggaggtcgtctccaacgcttctatatcagcgatgatgatactgccgtttggggactagtgtaacagagccatatataacaagggatgggcttgcaacctgcattcatcattcacccacagccttttatccatctcgagttttctaccaaagatttctattttgaacacatccaaataccctcggtgcaaacaccaaatccgtggccatatggtgttcatagccagcatttccgatatacggaaagagatcttcgaaaatgacattacaagacgaattgtgatcagattgaggacccaaaatctggattctgaagattatcgcgtctcagcttagggatttgtcagcgatcctgcactgccctgtttattactctcgcaaaccttgtctcggacagcgctttatcaagcccatcacgggatatccattttcgtttgcgatttggtgagattgctcccagaatcggccgcaaactaaggatttcagccatttcgaagtcaaaaaagactttctggattgtagaactaattccgcggcattgggtccttatggacaacaaaaaggcggtatatctgtgagagcgactctttcatcttggctattaaggagtcttacctcatttccttgagtgccagatcgagaggctgcccacccggactcaacagtatcatatgcttgatatacgataccagcggtcgacgatttgcacctgagatgttgtgcagtagtgacagtgcggaggctggtgaagcgatgcacgcacgactggtgcaccatgcggcggatgagagttgatgaagtgaggaagttgaggacggaggagtattgatgaaagaaggaaaggcagaagggatgaaagaggagtaacaaatagggaggggttaaattgcctagaatcgatcggatcgaatcatgttagaccatgtgtctggaggggaaaagggccagaggattgtggacaaacctgggcgagagtcgacgttcgtgtccctccaatcgtgccttccgtatcctgtggtttgtccattatgaagttggtatttgggctagcctgtcgagctttgagtcgtgttggatatggtgtcgtgaagatattcagatcgttgaccttagaagtcaacctccgagcagcgctgatgtaaggataatgttgacgtcgacagatacatgtagttaggtaactaaactactgcagaatgctgcaagaggatgtcacttatctgataacgtattcttcgtaatttgcccaatattgactcaactcgcagaagaaagaacagatactctttgagaatctctctggtctctgtactgaacttactgagccggagttctatccaagccacccgcttagaaaggaaaaatgccagtattaagtatcaaagataatccaactaaccaattcgatcaatttgtctcattattgctatacaggaagtacagctacgataagagacagtctctgaaggtaagaatccaggaatagccctaggttatagaaagcttatcggaaaaaaagaaaagaaaaacaaagtccaagacgggtcttaaccacgaccgtaaggctatgttacccagtgatggtagcccctgatctacgtaaaagcaaatggggaatgatcttattccctaaaatgtacattggtaaggtgtagcctgtagggaatgcccgccccacacctactctagttgaagaccggtcaggactcagaccatgttcttttactattatacgatagccaagcatttggccagatgaagatagtttgtttaatttcctgcaaggtgtcattgtagctcacttatctgatacgagggtctgtcactattctgtagtgttccgagaacaccctggtgtatagacacaaaagcctgacgatgaccccacggcagcagttcttaatgattgcagcacggttaaaacttttcatttcctctcaccaatcatccgctcgagtcttgcagcaagcgacgctcatattccaagcgtattttgcgggccgacttgatcgtgtggcactcccgcagacacagatagaggtccagaaggtcgacggcagaggacgactttgaataaggatggctttgtaaggtgttccctgattaggaaaatgatccgcggattctgtttcttgctattgacgtatgggataaacgtgtcttcattgtcatcgacatcaatcattgctgtttccaaccggttcccttcagtccggatatcccgagacagatggaaacaggttgtctgcctgattatccaggcaccaaacagtcacctgagcgataagcatccagtttttttcgccgctttttttttatgttgtacatattcccccaccatcagggattagacacggcattttctttcgttctggtctccgttgacgctgtactttttaacattgaattccccaggtttcgtcactttggatctgtggtagcattccagggaccgcatccgattgacttgacgtctccgttcgcttgtccacccgtggttttaaggggtccaattaatttcccccacctctcccctgaaccatttcgactggacacttgtcggctagaatccgatttcgcaactggtcgcgtgcgccaaagataagccattgagcctccgtgtcttggcttacacgtgcacataccattctcaactcacaggtagggctcccgtcccctttctcgcacgttccgtgtgcgactctcgtgtagataaggaatcccaccgtatcgctctgtgttctttcaagtacaccttgcccccttttttgtaattcgactcgactctcgctccagcagcactcgaaccattggccttctttaatcctaaccatactaattcccaacagattcatctacggctcggatatcagtttgaccaaggcttgcacgcaagtggaaccgttgtcggctccccgccagacagaattgccccaaagcccattacgcaactattcaccatgccttctctggatgatctttcgactctcatacttcgcgaggaccaagaacaccccagatccgaggaagattcccagggtctattccagcaagtacacgaatggctgcaccatgagaaagccagacgacagaatcgtaaagcacgcaaagccgaagcaacctcccatgcgacaaacgagaacgagtcaaccgaagagaacgccgttttagaaagacctagctcgaacacctcgaacacctcgaacacctcggagaacaccttttccctggataaactggaaagaatcctcctccaatatgcgactgcccgacctagaagtgcactgggctcccacagacaacctgtcaaacggcagtctcggcatcgtcttagaggcctgagaagaggctcggcctccgagtctgaactcacagatgctgacggggccccgccaagcgtggaagcttccctggataatacaaagacgcttgcgtacaccggtggcactgcagtagaagagaacaccgactccagcgcgagtgtgaaacaaggaaaggatgccgaggcttgggtggttttcaagtccgagatcgtacgtcttgtacacactctgcagctgaagggctggcgcagggttcccgcggatttggcgtcagagattgaagtggtcaggctcagcggtgccctcacgaacgccgtgtatgtagttgcgccgcccaagaatctgcctccttcaaagaccgatagcaacagtctggtttcaaggaagcgcccaccgtaagcaacgaattccccccctcgcttggagacacatctaattggattacaggaagcttctcttgcgtatctacggtcctcaagtcgatcatctaatcgaccgagagaatgagctgcaaattcttcgtcgtctcggaaagaagaatattggcccacgcattctcggaaccttcactaatggccggttcgaagagtactttgaggctcgcccactcactcccaaggagctgcggatgcccgaaacggcaaggcaggttgccaagcggatgagagaattgcatgatggcgttgaacttcttgaagaagaacgcgaaggcggacctatgatcttcaagaactgggataaatgggtggaccgttgcgagcaagtgatgaactggctggataaagaaatcgaatcccctcaaaacgaggccaaagctgcatcggaaccatggcgtcgccgcggctatgtctgcggcgtaacgtgggacgtgttccgcagagccgtggataactaccgactttggctggttaacagctctggtggaatggccgagatcaagcgacagctagtgtttgcgcataatgatgtaagttcatctcttccaagtgcaccttcctgggaattttactgacttgtttagactcaatatggcaatctacttcgcatggagccggccacagagtcaccgctgcttttgcctgcaaatgaacataaacagctgatcgtcatcgactttgagtactcttcggccaatacacctggactcgagttcgccaaccactttgtaagtctaacccaactactaatccaaatggatgctaaccacaacagaccgagtggtgttacaattaccacgacgaagagcgctcatgggcttgcaacaaccgcaactacccaacgtcagaggagcagtaccatttcgtgtcgacctacctcacccaccgaccttccagttccggcgcacttatttcacctctatcctcgccgaccattcgcgctcgccctcctgttgcgctcgcaccgttggacttggacgagggttcggacagacccagctctcggctttcccaaaatgagcagtcgaaagaggctgaactcgacgccgaggtacgattcctcatgaagcagacccgaatgtggcgggcgatgaactccgcgcagtgggtagcttggggtatcgtccaggccaaggtgcctggcatggaagaaggtattgccgagatgcttgctgctcgcaacgggccaagcgacggcaatgacgatgacactaagacgccacctgcggtcgatatcgaagaagaagatgacggagactttgactacctggcttacgcacaggaccgagtcatgttcttctggggtgatctgctgtcactaaatctgatcaaaccagaggaactgcccgcgcctctactggagcacataaagtcgcggcttgtcacatactaggaggagaatatacgataatcttgacggagacttgttcatattatgaattacagagtggacgccagtacatagcactgcgtctatcggtgacttatcacacctacatgtatctactacacaatagcgttggggtttcaacatcatcatcgaataccatatcttgtcttatatcatttccaatcatctccagggtatctgaaatgccattgtagataagcagccaacatccaaccctacctccgcatctcaagcttcttccgcgtctccttcttcgcaccctcaacccactccccataagccttcccctccggatccttctccttaaccccgacaacccccttcaaaacctccccaataaacccaacaaaattacaccgtctgagcgtattctcccactgccatgccgccctcttcctctcctccctctccagcgtctccacatccccaatgtccctcgccctcccacgcggatcccgcacaacagccataagattaaaatgtgtttcgtcaggcgggtagcgcgcaatccgcctctgcagaacctcaataaccctctcgggaaactcagccgcgccgcacggaccatggctaataggatgcggctgcagcccatccaactcatacaacgtcccattaaccggtgtatacgcaatgaagtgataaacgtccgcacccttctcgtcgtcctgcggacgcgccgtctcgtcggcgaacgggctcgcgcgcgcaaagctattgtgcgcgctgcggatggcttccgagtttgacagcgcctcgccgcgcagctcgggcgggaaccccgttgtgaagtctttgaaggagcgcagctcgttgccgagctcgattgctggctgtggcgatgctgggtcgtcgtggttgaggattacggagaggatcgcttgcgtgccgcaggcgttttggatcgtctgcgccgcgaagaagagcttgtctgttgcggcagggtcgtaggttccgtctaggggggcttcggcgcgtgcgccggcggcttcacgcgtccatttgaagaggaagattacgccgtagactgtgctgtttggggttagctttgtggactggttttggttgtggagtattttattgaaattgcggggcttgggaggtttgggaggtttgtgttgcttaccctagtgcccgtatcgtgtctgcgtctagagatatgagctcttcgaattgcgtgtcttttactccaagtgtttcgatcagagaggtgaagagaccctagcttgggttactatgctgctttggatggatcgtggggttgatggtacctcgtctgactcgatggtgctccagccacctacatcagccattttgactgtctgtgatggatgctaaggatgattgaatggaagatgttgtgttgtcgatatgagcgcttgaagttgctttcttccctaaatgggaatgcggttatgtcattgtcacgtgaagactgattgtgatagctcgaagtcacgtgcgtctccaccatatcacaacgatatccacagacacgttattttacagatcgagagggccatatggcagtgataattgacttttatttctgtgccttcaagggagatctactcacaaacaaacggggcctactgccggagtgtgccagcactgcggaattcgagaatgatgatttcggcgtggaaatgctacggagagaacttgacctaaagcaaaatcacatagtgcttggtcaaatggtgaatgggtagtcactctattgacgaaaccgtagacaccgagaagcaataggatgattgagccatgaaaatcccccatgtccctgcattctgttcccctagccgcgttggatcgcggagaaaagctccctcatgtttgcaagcatccctaggatgtcgtcgaattgctttccacgctgttcgggagctgtcgttggggtcagcgcccgagctgggacgatcagctcggtatagttgtctgcgcaatgaaagaatggttagagaagttagcgtccatctcagaattgagaggcctgctattacagcatgagactgaaatggactatgacgcttttgatctttctctcaagatctagagagtgagtttgaagatagcgctatcaagagaatgataaaggtgatcatctatcattcgggagtcctcgatgacagggcacaagctgattctagcaaggctcattcttgactatccccagggcggcttctaccaagtataggcttcctgtcaccaagatctgtcctcctataccaatcatcttggcatgatcaatgccatttctgacattatgtgccatataaatggtctttgtaggccaatgctccctccagaactgggcatattcttccggccatccactcggagtggcaaaatgatcgtcatattcaatcttttcgacgaatataacatgctgaatttgcatttgtagagagttccctaacgtttttagtatatctttccagtcacgcgttcgcttcggcgaaaaatgagcaaagataagaactcggacagagctgctagtccaggccattgttagattactcactggtaattccaaagggaacttacctcgtactggccacccggttataccattttgcgactactgccatacttgtctcgttgtgtgctccgtctaaataccacgtgcagccactgtaatcgataatgtcgaagcgtcctggccagcggcacttctcaataccagctaggacatcctgtccatcgagcgagtgatcacataggtagagaaacctatgagcaatttgtatagccagcgcgcagttttctagctgttcaagtggcaggtcttcaatgtgaacgtctttaacgaattcaagcaacgtccccttaacatctctgatgaattggagtgatgagcccatttctaaagcccggcgctcaatctcgctttctacctcttgatcctgcgaaactgagagtgaaagaaccccctttttaaagattccacttttatgccatgcaatatgcttcaaggtccttcctaggttttcaacgtggtccatgccaatcttcgttatggcagtgatggcaggacgatcaacgaaatttgttgcgtcgaactgaccaccatggtgggtctcgcagataacaacgtcgacgccttcttcaatgaacgtgtggaacgccaagatggccaacatctggagaaacccaggggtcttggtatcggttggcaacgcgtcagagttgagagacaggcccctgtatacttcaaagaaacgcctggcgaagagatccactggtaatggattcgaatcaattcggattctattccgaggccacagactaggcgatgtgtacagaccgatcttccgcgtaagtccatttcttttcgcatgctcacgcaagaagcagtccacataggcgcatgtgctacctttgccttttgtgccggcgacatgaatgacattcaagcgattaatattttcggactagtatccgttagtgaattccaagtgacgaaaatatcgcacatacatcatgcccaagggttagtagccagtctctcataccaaggagaggttctgaccctttcaaggtagaagcatttggggcctttgggacacttggcgacgacgatagcgtcgccgacgaatcggggaatggccgccggcactgttgaagcaatccgattgctttctaggctcgttagaactggtatcacccacgataaataagcctacttggtatgccatgtttgacgtgggtctgcctttgttctgttgagatgtgacccttgcagtcctcgggatttgctgagacagctaaagtggttcctaaggcaacaactggagctggataatttcataagcggaggtcctggcattaggtatgtgattatggcagtagtcaactatatacggagtaactagttaactacttggtgtttaaacacccaatggtcgagtgttggttgcggaatgagatcacatgacctagaattgtcgagaaattggcaggaacggatgatcctttatccgtaggcatggctgcccaacgcgaaaccctataacagacatgaaaactctcataacggctgtcaactctattacctttccgacctgagatgatcttctcggacctccggggtcttgattgattttgtagtacgtattaccatcgtgataccgttgtcaacaagcggcccttcctcaaacatatacacaagtatatacacgagttgatgggagacaatgcgttgataggggtagggagtaaacagtacccaggtttctattaggcaggccgggaaacaaagtgtgtccgcttaaaatgtaggctgtagactgtgttgggattctaccgtgtccgccacgaattcaatagtgtatgtggtgagccgtgtggcctgtcagatctttggatcaccagatggagatttagcctccggaatctagactctggatacatcgcccaaagtctgtatcaaaatcccgctttgaccgccataaaaaagcaaatccatctggccggcctcacgcagataacaacaaccacgcagcggcaagccctgagtctggagaaccatagctaattacgatagctgcggtaacatgcaggacattagtacaatccagggatattgatcgtgcgtactaatagcagcctctttgccgcggacattccattaccgtgttgtgctgcgtctgcgaattctacaaaatccagagttacctatcgccatcaacaaggcagttcacattgggttcagattccatgagctttctcgtcaaattctttgagtgtctccttcttaccaagtctatattctcgacctgctatcgcaatacctccatcgagtctttcttggggagtgagaacgtcacaccggggcaggagatagccgcggaggtagacactttcgaacgatccacataccctcgatcactggcatacaatacaccttcgaccattaagattcaacccgttctaagtggccggtcttatccttcacctcggagttctacagcttgatatcttctcctgaaggaaccgccagcgaatataactggacatcatggcttccctttctttacaagggtatgtttccacccttggtcacgattcactgtcaatgcttatagctaagtgggcagattgatggatactaccaacgcagacacaagacctacgaatccgccccgtatcataatcctaatggagtacagagggatgttagagtgttaccccgtggctcaaactttcctacttttttatgctaagatggatgatggaacttgcaagactgtgcgtattggactatgtcggatattggaaggagacagatcgtcgtgcttgctggaccgaaatataagccgccaagcgaaacacatattgccgtctgaggagtggagtttcttggaagatcgatgtacgaggaagcgacagcggctgtaagctggtcatccgaagaatataatacccaagagatttgagttttcgtaaagaaatcgaagacaagcttaaataaactatcaacttgagatggtagaaggtgggtgacgtcgatttcagcgtctacaaaaaggcgcgatttgctcatacgtttcatcgatggcattggaccctcataattcgggttcgttgtgatatatgcttacctactccgaagagatgactagaactgggtgtcggtcgccattttagaggaacagaatcataacagtacagatgaccctatcatgctgccgagcctccatcttcaagcttaaccacggcaacgtccgtgtgtgtgagttccatgattggtttgtcaattaccctgccaggcagggaacctgtgagcagtaacagtcataaatttggagcccaaagcattttgaacaaggacacctgaggataaacgcattaactctgctttgagatttataccagagcttaaagggaagagcaaagagcatcacaatttcattaagtaatgttgaatgacctgctaatgtttgtcctgtttgataggcttcattcaactaaatcacactctcctctcttacttctcacagcaccatcacttggctggtcacagcaatacctctctgctatgatccacggccacaccggcactacactgtttgactagtgctaccgcgactgcctttaaaatcaatctcagctatgccactgctacattctagattcctagtcatattgagcaacgacagtaccgtctcttgaatcatccccagcctcttcactgcttcataccctcccacgctatatcaaccacactctcgccacactactaccagctcttctgccgcactcgatcaactacattatcgccaggatgggccggagtacccgagggtgcggagagtgcggagggtgccgccagcaaaaatatcattgccctagagattgtggctaaagagctcttcttccagctcaaagcctcagtgaggatgttcgtgggcaaccgaatcgaccgacatgcgctcgagaaaacaaccgacaaactagaggacaagagcaaacaagacaagagcgtccggatttcagaaatgagcttggaggacgtggaacagtgcctaggcatgatatggagatgaaggacgtgcagtcgctagagtctagaggtggctcaggtgacgcagatcagacgccgaagaaaagaatcgaaataatgaagcaaatatgctctatctacgtcaaccctcgtctcgagctaggagcgacaaatacacccgggaatcaagtgaaaaagaaatgaagtgagagtgagagcgaaatgagagtggactcttttttgggtcgattttatgttgttatttttttctcactctctcttttttcttgtgagtccagagaaagattgcctcaaaaaatggttggggttcacattggccagtcaactcaatctctacctcgagtggcccagaaaattttctcaagagagggaaatatggcgctagtcctacggttgaagggaacggtataaccctaccattcattctacgacatcttactagacacactaggacaaggcggagcggatttcgtgttgacatcccagatgctattgcatgatttggcggaacgtgtctggattacacttgataaggccaagaaggtcaaggtcccgaaggaaaatgcccatcaacgttaaaaaaatgggcgtctgtgccaacgatggcatattgtctatgaaattgtggtgcttttctctgtcggtcacatggaatgggataaggagcaaacgcatatgatcacaatctggcagcttcgagccagtcatctagtggtcatgtttcatacattcctgtgatgactgctgataccactccctcgtctatccgattgacgcgatcctcagacgcctcatcgcccaagccgtgctagccatccctgacaaccttaggttgccgagggtccgcgactgcgaaagctattcaaacgacaggaccgtcttatttggtgtggtcgatgccggagagtgatagagctcagcaatccctgtacgaaaagtacgaaaacggacagctatcatatttgggcccagcgaggaagaagaagcagaccgaaagaaacgaatcacacaaaagacatcgagccaggttattaagaagtctctggtttcacgagttgcaagttctacccatcccattgtgttatttctctggacatcttttctttgatcaccaaatatctccaacaagaatggcccacgacaaaatacacagatatcattgaccctggagctatacacgaccatttttatcctcggcgccaggtcaatggcatatgggagataaattattctccttattactttgtacgcattcttagatcacagtctctgtgacgatctaagaacatgcaatccaaacgcacttccgatgtctgtaccttccactcgtcgaggaagtcgcgccttcctcgaacgtaaatgagaagtatcatttgcatagtttgcaggcagagcaaatagttttcctttctctccttgtacttagtatttggtcgaaaatgcactcattctctgaactgatctagcacgtaacattctcgttctctagtccgacctctccaagctctacaacttcaccaactcaaaatatctcccccctagctccattgactctaattgcgtcccctgttccacaatgttaccttcatgcaacactataagcgtaagttagtctctgcattgtaaacagaatcgatatttgtttcttaccgtaaatacaatcggccttctgtaccgtgcttatccgatgcgcaacggcgaccgtcgttcggccttgagccgccgcattcagtgcatcctggacgaccttttcagactccgaatcgagcgcggaagtcgcctcatctaggaggaggatacgtggatcacgaagaagcgctcgcgcaatggctatttgttgttgctgtccgccagagagcatgccgcccctcgctcctatcaccgtcgagaagccgtcactgagctgggcgttagtagatatttactttaggtcagaaatagaaaagcagagccggagggtgcaagggaaaggggtggcttacggtagagatgagatgaagtcgtagatattggcatccttgcatgctttgatgattttctcctcggaaccatcctcgtcgttggttcccagggtgatattctccctaatggttccttggtatagcgtcggctcttgaataaccagagcaaggtggctcctgtagctcttgagattcaatctagaaatgtctttcccatcaaccaatgtttgacccgcttcaggatcaaagaaccgctccagcaaagcaatgatggtgctcttcccacatccactcgctcccactagacctgtgtattggcccggttgaatactcaagctcaagccgctaataaccaccctctccggtctgttggggtatcggaaataaatatttcgcaactccaagctgccttccatattcgttaacagctcgccggtttcctggcgggcgtcaatattgacaggccggtccaataacgttttaatatcctgggccccctggcgagacttgctcatatcaggcgcgaaggagaaaatagccccggcgctgaatgcgcctacgacgatagccgcataagcgatgaagaactgcaccatagaatagccttcatggattatgagacttcctccataccagaaagccagcgcgatacatagaaaattggccgactgtgaggctgcatagagcgctgatgacttgagtgttgaaaccaccgatttctgtcgctgagcttccaatatgttgtgatactctcgctgtgcatggctttcaagatttagcgatgcaaccgtcttgatggcagaacttgcctcacatgcataagttcctgaagctgtatatgccgccttcgactatcgagccatttccccgaggatcttgagtcggacgagaccacaagtaagaacaactggaatggttgcggtacaaaccagtcccagcttccaacctatcgcaatcgatacagccacgccagcaatcaaagtcgttgagacaatgaagatggagcctaaaatcacaccactcattccggcaaggttggtagcatccgtggacaacgaggatgtaagtgaaccggctgagaacttggctttgtcgaacatggaaatatcctgatagagcactcggagcagtaggcaaaacagagacccgatgctccccagcccaagaatgcagtacagcccagcatcagatacatcacactccagaagttgacattatgacgtagcttttcatgcatatcaggcggcaacgacattgccgcgattttcttgccgtagaacacggcctgtctacggaatggtcagtatcgatattctgcacagcgtgggaatagagtctagcgtgggatttccagcgcctgtgatgattgaaaataacagaccccagaccatggttagcgtttcttccttgttgaagttggcgacaaacttgatcagctcccataaggagtatttgtagtcggtctcttgctcggaatctctcccgcggtcttcggttccccgggtgctgctctacctcgtacgtatatattttagactctttgccctcgtcttttaggtcagaagctcagggtctgcttcgagggcagactttgcgtcgctgattacgatactcctttcggtcgacatgcgctgcttctccactaactcgtaatacatcgatcgtttctcaagtaggtcgttgtgggttcctggctcgacaacacgtccgtgagacataacaacaatattttctgcctcagtgatagtagataatctgaataatagtcaatttctgtctctaacactaatcgaacacataccggtgactgattgtgattgttgtccggccttccgcagcaacatcaagcgccgcctgtaccaaccgctcggcctgggcatctagagctgaagtagcctcatccagtagcaagacctttggattgctgataatagcccgtgcaatggccactcgctgtttttgtccacctgaaagtaatgagcctctttcgccaacatcagtatcgaatccatccggcaaggcggagataaattcaaaacagttcgctttctttgcggggtcaaacacaagcttttctattacagcgtgaagggagttttcgtgtccagtacctatcagaccaaacctgatattttcgaatactgtcgtggcaaagagagtgagctgttgcgtaacgatcgcgacttgttggcgtaaccattgtaaatttagagacgtgatatcgtggccatcgagcactatggtgatctcattagcacggttcattcttcacaagaaaaagcctcacatatctcgccacttattggttcataaaacctctcaatcagacccgccaatgtacttttcccacagccagaagcaccaacgatggcggtcgtctttccagctgtgttaggactagctaccagcgtatcctgaaaatggaggtt
